(19) United States
(12) Patent Application Publication
(10) Pub. No.: US 2025/0325469 A1
(43) Pub. Date: Oct. 23, 2025

(54) Inhibitors of atp synthase - cosmetic and therapeutic uses

(71) Applicant: Michael David Forrest, Poole (GB)

(72) Inventor: Michael David Forrest, Poole (GB)

(21) Appl. No.: 18/271,488

(22) PCT Filed: Jan. 24, 2021
(86) PCT No.: PCT/IB2021/050529

§ 371 Date: Jul. 10, 2023

(51) Int. Cl. A61K 8/64; A61K 8/60; A61K 38/17; A61K 48/00; A61Q 19/08; C07K 14/47

(52) U.S. Cl. CPC A61K 8/64; A61K 8/606; A61K 38/17; A61K 48/005; A61Q 19/08; C07K 14/47; A61K 2800/86; C07K 2319/07; C07K 2319/10

(57) ABSTRACT

With supporting experimental data, this disclosure teaches that IF1 protein activity is a molecular determinant of lifespan, therein explaining why different species have different maximal lifespans, and it teaches a IF1 protein/fragment (or sequence variant thereof), or a fusion protein thereof, optionally a fusion protein comprising a Cell Penetrating Peptide (CPP) sequence, as an agent to slow/delay/reduce aging in a subject, optionally as a component of a cosmetic, optionally to treat an age-correlated disease/disorder. Moreover it teaches other inhibitors of F1F0 ATP hydrolysis, including small molecules, of a number of different scaffolds, for this purpose. Furthermore, with supporting experimental data, it teaches that compounds that slow the ATP-hydrolysing mode of ATP synthase are useful for treating various diseases and disorders, including cancer, particularly cancers that utilise the Warburg effect.

### RELATED APPLICATIONS

[0001] PCT/EP2018/051127 (published as WO2018/134265A1), PCT/EP2018/069175 (published as WO2019/012149A1), and their corresponding 371 national entry applications into the USA (U.S. application Ser. No. 16/478,497 [published as US2020/0247758A1] and U.S. application Ser. No. 16/629,390 [published as US2020/0306253A1] respectively), Canadian application number 3,050,553 and Australian application number AU2019208238 are all by the same inventor as the present application and are all herein incorporated in their entirety by reference (and the entire content of references [cited papers, patents and applications thereof] therein). Also incorporated in its entirety by reference is applicant's reply to the “written opinion of the International Search Authority” for PCT/EP2018/069175, which is publically available on the European Patent Register file for the EP entry of this PCT: EP application number 18746115.7 [published as EP3652156].

### FIELD OF THIS DISCLOSURE

[0002] This application discloses compounds that preferentially slow the ATP-hydrolysing mode of ATP synthase, pharmaceutical compositions of these compounds, and methods of use for slowing/delaying/reducing aging in a subject, which has both cosmetic and therapeutic applications, and treating subjects known to have various diseases or disorders, including cancer (e.g. diagnosed with), subjects suspected of having various diseases or disorders, including cancer, or subjects at risk of developing various diseases or disorders, including cancer. In particular embodiments, the subject is a human. In further embodiments, the subject is a companion/pet, or farm or laboratory animal.

### BACKGROUND OF THIS DISCLOSURE

### ATP Synthase

[0003] ATP synthase (also known as F₁F₀ ATP synthase, F₀F₁ ATP synthase, F₁F₀-ATPase, F₀F₁-ATPase, F₁F₀ ATP hydrolase) is located at the inner mitochondrial membrane (IM). It can use the proton motive force (pmf) to generate ATP from ADP and Pi [1-3]. ATP synthase is reversible and—depending on its substrate/product concentrations, the pmf and the voltage across inner mitochondrial membrane {Ψ_{IM}}—it can work “forwards” (passaging protons, making ATP) or “backwards” (pumping protons, consuming ATP): its “forward” and “reverse” modes respectively, which may also be termed F₁F₀ ATP synthesis and F₁F₀ ATP hydrolysis respectively.

### IF1 Protein

[0004] IF1 (or IF₁) is an endogenous protein, encoded by the ATPIF1 gene, which selectively blocks the reverse mode of ATP synthase [4]. Its activity is pH sensitive and low, but non-zero, at normal matrix pH, and significant upon matrix acidification, caused by collapse of the proton motive force across the mitochondrial inner membrane.

### SUMMARY OF THIS DISCLOSURE

[0005] A teaching of this disclosure is that reducing F₁F₀ ATP hydrolysis in a subject can slow/delay/reduce aging in that subject. Any anti-aging drug that targets/inhibits/reduces F₁F₀ ATP hydrolysis is componentry to this disclosure. This application discloses numerous anti-aging drug examples, many of which are also new compositions of matter, and discloses rationale and methods to find further examples, which are, in turn, encompassed by this disclosure and componentry to this application.

[0006] Compounds of this disclosure, which reduce F₁F₀ ATP hydrolysis in a subject, can be used to (a) slow/delay/reduce aging in a subject (which has cosmetic applications) and/or (b) treat/ameliorate/prevent/combat diseases, disorders and conditions, including age-correlated thereof (risk of incidence increases with age), and including cancer, wherein—without seeking restriction by theory—the abnormally glycolytic metabolism of cancers (Warburg effect), especially used by the most dangerous thereof (e.g. most refractory to present chemo/radio-therapies), hinges upon abnormally high rates of F₁F₀ ATP hydrolysis (consuming glycolytic ATP, releasing glycolysis from ATP negative feedback inhibition, yielding higher glycolytic rate, thence more glycolytic intermediates available to be shunted into biosynthesis, enabling faster proliferation, and more NADPH produced, enabling more Reactive Oxygen Species {ROS} mitigation, and less ROS produced because oxidative phosphorylation {OXPHOS} disfavoured by high proton motive force {pmf} across mitochondrial inner membrane created by F₁F₀ ATP hydrolysis, so [ROS] is lower, enabling enduring information fidelity of DNA and “limitless replicative potential” (i.e. immortality, which is distinctive trait of cancer, which normal cells don't share)), which a compound of this disclosure disrupts, conferring anti-cancer activity. Moreover compounds of this disclosure attack cancer characteristics shared with embryonic stem cells, which incidentally are immortal, and which aren't found in the adult human body, but are in the blastocyst ˜5 days after fertilization. Thus compounds of this disclosure have utility as emergency contraceptives, for preventing unwanted pregnancy, with a later time window than the “morning after pill”. In normal adult cells, reducing F₁F₀ ATP hydrolysis reduces a futile cycle of ATP synthesis and hydrolysis, used by the body for heat generation. If exogenous heat replaces this reduced endogenous heat (higher room temperature, wearing more clothes, geographical relocation to the tropics etc.), this reduces energy (food) consumption and treats/ameliorates/prevents/combats cachexia, cancer driven cachexia and/or weight loss, wherein cachexia is the biggest cause of death in cancer patients. Reducing this ATP synthesis/hydrolysis cycle means the oxidative phosphorylation rate is slower, less ROS are produced and the body accumulates less ROS damage per unit time i.e. aging slows. Therefore, F₁F₀ ATP hydrolysis inhibitors of this disclosure extend lifespan and healthspan, can treat/ameliorate/prevent/combat accelerated aging diseases, progeroid syndromes and the diseases of aging (e.g. Alzheimer's disease, dementia, Parkinson's disease, cancer etc.). It is noteworthy that compounds of this disclosure both treat cancer and slow aging, whereas many present cancer treatments accelerate aging, causing greater incidence of age related disease(s) and ailments. Also, it is noteworthy that compounds of this disclosure both treat and prevent cancer, whereas many present cancer treatments (e.g. radiotherapy) increase cancer risk. Activated macrophages are distinct from resting macrophages, and other normal adult cells, because the nitric oxide they produce to kill pathogens switches off their use of oxidative phosphorylation and they rely on F₁F₀ ATP hydrolysis to maintain Ψ_{IM}. Compounds of this disclosure inhibit F₁F₀ ATP hydrolysis and so depolarise Ψ_{IM} in activated (not resting) macrophages, which triggers their apoptosis. Compounds of this disclosure treat/ameliorate/prevent/combat macrophage associated diseases or disorders (e.g. Macrophage Activation Syndrome, HIV hides safely in activated macrophages during anti-retroviral therapy {ART} and from here repopulates HIV virus in blood plasma when ART is interrupted or discontinued, virus neuroinvasion via macrophages, thence HIV-associated neurocognitive disorders). F₁F₀ ATP hydrolysis inhibitors, by increasing metabolic/bioenergetic efficiency (less heat produced), can cause energy/weight gain in a subject, which has therapeutic, aesthetic, physical/mental performance applications, and commercial applications in livestock and farming. Compounds of this disclosure reduce F₁F₀ ATP hydrolysis and can reduce body temperature to a value controlled by intersection of compound dosage and ambient temperature (even at maximum possible effect, compound can't make body fall below, only to, ambient temperature; body temperature controlled by controlling ambient temperature), which can treat/ameliorate/prevent/combat a disease or disorder that drives to and/or causes a higher than normal body temperature (e.g. fever, infection, sepsis, malignant hyperthermia, neuroleptic malignant syndrome etc.) and a disease or disorder combated (or surgery or medical treatment helped) by hypothermia (e.g. neuroprotection/cardioprotection/tissue protection after a stroke or ischemia, deep hypothermic circulatory arrest for surgery etc.). Disclosed herein are the first drugs to treat/ameliorate/prevent/combat emergency grade hyperthermia, wherein hyperthermia is an extremely dangerous aspect to many Emergency Room (ER) admissions e.g. in some trauma patients. This is a valuable contribution to the art. Inhibiting F₁F₀ ATP hydrolysis reduces body temperature, which slows/reduces neural activity, wherein as regards body temperature, large reduction confers sedation, with applications to sleep and surgery etc., and smaller reduction confers anti-hyperactivity, anti-anxiety, anti-depression, anti-pain and treatment for premature ejaculation, epilepsy, Tourette's syndrome, Attention Deficit Hyperactivity Disorder (ADHD), Post Traumatic Stress Disorder (PTSD), homicidal/criminal/suicidal/self-harm ideation/tendency/thoughts etc. The intersection between F₁F₀ ATP hydrolysis inhibitor drug dose, and ambient temperature, dictates how much body temperature falls and thence depth of the sedation, wherein if ambient temperature equals 37° C., the drug can't reduce body temperature below this, no matter the dose, and no sedative action can occur. Drug action against a fundamental physiological parameter (body temperature), which dictates a further fundamental physiological parameter (action potential characteristic(s): firing threshold/conduction velocity/firing frequency etc.), yields incredibly broad therapeutic application. It combats any pathology/condition characterized by too much/inappropriate/undesired signals/activity/electrical activity in the nervous system. Juxtaposition of sedation with anti-aging action, which a compound of this disclosure confers, has applications to space travel, especially because the sedation can be turned on and off by settings of the ambient temperature.

[0007] By reducing metabolic heat production and body temperature a compound of this disclosure can treat all the many conditions in which the body gets too hot, can treat all the many conditions assisted by a lowered body temperature, which (because neuron firing characteristics are very temperature dependent) includes many neurological/mental disorders characterized by too much/unwanted neural activity, wherein the body temperature drop doesn't occur if the subject's ambient temperature and/or bodily insulation is sufficient to compensate for the lower metabolic heat production, wherein this lower metabolic rate slows the subject's aging, which can then slow/delay/prevent/treat the many diseases of aging (diseases/conditions with increased risk of occurrence with age), wherein the increased metabolic efficiency (less chemical energy of food dissipated as heat) can help treat cachexia, wasting and similar, wherein the compound adversely impacts the distinctive metabolic program of cancer, conferring anti-cancer activity, and selectively kills activated macrophages, and so it can treat the many diseases/disorders caused or exacerbated by activated macrophages, wherein many pathogens hide in safety from the immune system, and drug treatment, inside macrophages (which they inherently activate), for example HIV. When the compound is administered topically (e.g. to skin region), instead of systemically, the drop in metabolic heat production (and slower aging) is local, wherein the temperature of this region is maintained by heat transfer from other body areas, especially via blood flow, and so there is no temperature change, but there is slower aging in the administered region, which has cosmetic utility.

[0008] In some embodiments, a compound employed of this disclosure is an IF1 protein/fragment (or sequence variant thereof), or a fusion protein thereof, optionally a fusion protein comprising a Cell Penetrating Peptide (CPP) sequence, as an agent to slow/delay/reduce aging in a subject, optionally as a component of a cosmetic, optionally as a component of a therapeutic to treat at least one age-correlated disease/disorder.

### BRIEF DESCRIPTION OF THE DRAWINGS

[0009] FIG. 1 shows anti-cancer activity of compounds 8a and 8b in the NCI one-dose (10 μM) assay.

[0010] FIG. 2 compares the anti-cancer activities of compounds 6a, 6b, 7a, 7b, 8a and 8b in the NCI one-dose (10 μM) assay.

[0011] FIG. 3 consolidates anti-cancer activity data for 8a and 8b from the NCI one-dose and five-dose assay.

[0012] FIG. 4 presents experimental data showing that IF1 protein activity is a determinant of lifespan.

[0013] FIG. 5 relates to the in vivo effect of compound 6b.

[0014] FIG. 6 shows that, in vivo, inhibiting F₁F₀ ATP hydrolysis safely reduces the rate of oxidative phosphorylation and ROS generation, shown with forebrain neurons.

[0015] FIG. 7 shows that, in vivo, inhibiting F₁F₀ ATP hydrolysis safely reduces the rate of oxidative phosphorylation, shown with hepatocytes.

[0016] FIG. 8 shows that, in vivo, inhibiting F₁F₀ ATP hydrolysis safely reduces the rate of oxidative phosphorylation, shown in intestine (colonic cells).

[0017] FIG. 9 is a diagram illustrating how decreasing [ROS] in a cell, for example by inhibiting F₁F₀ ATP hydrolysis which reduces the oxidative phosphorylation/ROS generation rate, can prolong/increase the information fidelity of DNA, which slows/reverses aging.

[0018] FIG. 10 presents some peptide/protein sequence embodiments of this disclosure.

### DETAILED DESCRIPTION OF THE INVENTION

### Some Guidance and Definitions

[0019] All publications, patents and patent applications mentioned or cited in this disclosure (or the corresponding Application Data Sheet (ADS) and/or Information Disclosure Statement [IDS]) are herein incorporated, in entirety, by reference. This disclosure uses IC₅₀ and EC₅₀ interchangeably, for a process being inhibited or reduced. Chemical structures were drawn using the chemical drawing feature in [5], and if a drawing feature is unknown to the reader they are referred to its documentation, or to explore the software themselves: all clear to those of the art. Hydrogen on structures is typically not shown, present implicitly, but it is shown for some presented structures “On Hetero and Terminal” [5] groups. Herein, the symbol D is used for deuterium (²H). For compound synthesis schemes herein, starting materials are commercially available or can be readily prepared by one of ordinary skill in the art using known methods or derived by procedures analogous to those described in the literature. Examples and preparations herein describe the manner and process of making and using this disclosure. It should be understood that there will be other embodiments which fall within the spirit and scope of the disclosure. Where a term is provided in the singular, the inventor also contemplates the plural of that term. A phrase in the form “A/B” or in the form “A and/or B” means (A), (B), or (A and B). Herein, wherever “and” is used, in an alternative embodiment(s), “or” is used/substituted in its place. And wherever “or” is used, in an alternative embodiment(s) “and” is used/substituted in its place. Herein, when something is referred to in the singular (e.g. by prefixing with “a”/“an”/“the”), unless specifically stated otherwise, in alternative embodiments the plural form/plurality is also contemplated and componentry to this disclosure. As used herein with reference to the utilities described, the terms “treating” or “treatment” encompass both responsive and prophylaxis/preventative measures designed to inhibit/eradicate/prevent, reduce risk of and/or delay the onset/cause of the disease or disorder (or one or more of its symptoms), or to cure/eradicate, alleviate, abrogate, palliate, reverse, prevent, ameliorate, lessen, reduce, modulate, stabalize, delay, suppress, manage, reduce predisposition to, reduce risk of, prevent, reduce reoccurrence of, lengthen time to remission of, or slow progression/spread of the disease or disorder and/or one or more of its symptoms and/or increase quality/length of life and/or improve subject outcome/wellness. The terms “subject” and “patient” refer to organisms to be treated by the compounds/methods of the present disclosure and can refer to a human or animal. The terms “subject” and “patient” are used interchangeably herein, in reference, for example, to a mammalian subject, such as a human patient. The term “subject” refers to an animal, including, but not limited to, a primate (e.g. human, monkey, chimpanzee, gorilla, and the like), a rodent (e.g. rat, mouse, gerbil, hamster, ferret, and the like), a lagomorph, a swine (e.g. pig, miniature pig), an equine, a canine, a feline, and the like, a companion/exotic/farm/laboratory animal. As used herein, the term “therapeutically effective amount” or “effective amount” refers to the amount of a compound (e.g. a compound of the present disclosure) sufficient to effect a therapeutically/cosmetically/aesthetically beneficial/desired result including, for example, mitigating/alleviating to some extent (reducing frequency/duration/severity, and/or prevent development of) or eliminating one or more symptoms of the disease/disorder/condition/sub-optimum, or treating at least one physiological defect or pathology or etiology that causes or contributes to the disease/disorder/condition/sub-optimum being treated. In the case of aging and/or an aging correlated/driven disorder, an effective amount is that which slows the rate of aging, optionally which can slow the rate of one or more aging correlated/driven disorders. In the case of cancer, a therapeutically effective amount can be, for example that which slows/halts/stabalizes/regresses cancer proliferation/spread/invasion/malignancy/danger in the subject and/or which slows/halts/stabalizes/regresses cancer associated cachexia. A therapeutically effective amount accounts for treatment variables including, for example, dose, duration, timing and route of administration. Some disclosure embodiments are to administer a compound(s) of this disclosure to a subject diagnosed with cancer, suspected of having cancer, exhibiting symptoms of a cancer, at risk of cancer (e.g., a human who is genetically or otherwise predisposed to developing a cancer), susceptible to cancer, recovering/recovered from cancer or free of cancer. Palliative use of a compound(s) of this disclosure, optionally in a subject with cancer, is contemplated by, and componentry to, this disclosure. The term “therapeutically effective amount” or “effective amount” can also refer to the amount of compound that is sufficient to elicit the biological/medical/clinical response of a cell/tissue/system/animal/human that is being sought by a researcher/veterinarian/medical doctor/clinician. The term “therapeutically effective amount” or “effective amount” of a compound can also refer to a sufficient amount of the compound that provides a desired effect but with no, or acceptable, toxicity. This amount may vary from subject to subject, depending on the species, age, and physical condition of the subject, the severity of the disease that is being treated, the particular compound used, its mode of administration, and the like. A suitable “effective amount” may be determined by one of ordinary skill in the art. Further definition(s) of “therapeutically effective amount”/“effective amount” is found herein, in the disclosure section titled “Dosage”, which is also valid for use with this disclosure, wherein if this is no correspondence/overlap, or if there is a contradiction of definition(s), all definitions are valid but for different embodiments of the disclosure. This deconfliction, wherein conflicting definitions of a single word/phrase define different disclosure embodiments, is applicable to any conflicting/non-corresponding plurality of definition for a single word/phrase found herein.

[0020] In some embodiments, where the word “subject” is used in a sentence of this disclosure, it is substituted with “subject in need of treatment” or “subject in need thereof” or “subject in need/want thereof”. In some embodiments, where the word “effective” is used in a claim or statement in this disclosure, it is substituted with “therapeutically effective” or “cosmetically effective”. Three different claim types: method of medical treatment, Swiss-type and Product by process (purpose-limited-product format, EPC 2000); in this disclosure, when a claim or statement is given in one of these forms it also incorporates by reference the same subject matter in both the other claim forms.

[0021] The meaning of “concatenate” or “concatenated” at each point of use will be clear to one of the art given each context of its use. For example, when used with amino acid sequences it can refer to these sequences being covalently bound to one another (e.g. peptide bonded to one another). For example, when used with nucleotide sequences it can refer to these sequences being covalently bound to one another (e.g. by a phosphodiester linkage, or two thereof if the sequences are double stranded).

[0022] Cancer is herein used to mean any member of a class of diseases/disorders characterized by uncontrolled/undesirable/abnormal/dysregulated/unregulated, including harmful/dangerous (to health and/or lifespan), division of cells, including that independent of normal regulatory mechanisms (e.g. loss of contact inhibition). A “tumor” comprises one or more cancerous cells. Cancer cells, in some cases, gain the ability to invade other tissues, either by direct growth into adjacent tissue through invasion or by implantation into distant sites by metastasis. Metastasis is defined as the stage in which cancer cells are transported through the bloodstream or lymphatic system. The cancer may be, for illustrating example, a solid tumor, metastatic cancer, non-metastatic cancer, malignant cancer, benign cancer or pre-cancer. In some embodiments, the cancer may be a chemo-resistant or multidrug resistant cancer, i.e. a refractive form of cancer. It should be appreciated that a composition/compound of this disclosure may be used alone or in combination with one or more additional anti-cancer agents or treatments (e.g. chemotherapeutic agents, targeted therapeutic agents, pseudo-targeted therapeutic agents, hormones, radiation, surgery, etc., or any combination of two or more thereof), optionally a further composition(s)/compound(s) of this disclosure. In some embodiments, a composition(s)/compound(s) of this disclosure may be administered to a subject who has undergone a treatment involving one or more of surgery, radiation, chemotherapy. In certain embodiments, a composition or compound of this disclosure may be administered chronically to prevent, or reduce the risk of, a cancer recurrence. According to one embodiment, the subject to be treated is characterized by the presence of a precancerous condition, and the administering of the compound is effective to prevent development of the precancerous condition into the cancerous condition. This can occur by destroying the precancerous cell prior to or concurrent with its further development into a cancerous state. For the purpose of this disclosure, beneficial or desired results in the subject include, but are not limited to, alleviation of symptoms, diminishment of extent of disease, stabilized (i.e., not worsening) state of disease, delay or slowing of disease progression, amelioration or palliation of the disease state, remission (partial or total), disease prevention, or reducing predisposition to the disease, prolonging survival as compared to expected survival if not receiving treatment. In some embodiments, a compound(s) of the present disclosure is used to prevent the growth of a tumor or cancer, and/or prevent the metastasis of a tumor or cancer, and/or to shrink or destroy a cancer and/or treat complications of cancer. A treatment using one or more of the disclosed therapeutic compounds and compositions disclosed herein may decrease the growth rate of tumor cells, decrease the cell division rate of tumor cells, decrease the extent of invasion of tumor cells into adjacent tissue or organs, decrease the extent of metastasis, decrease angiogenesis, increase apoptosis, increase tumor cell death, increase tumor cell necrosis, or all or any combination thereof. A treatment using one or more of the disclosed therapeutic compounds and compositions disclosed herein may decrease hyperplasia, decrease the growth rate of hyperproliferating cells, decrease the cell division rate of hyperproliferating cells, decrease the extent to which hyperproliferating cells becomes cancerous, decrease angiogenesis, decrease nodule formation, decrease cyst formation, increase apoptosis, increase tumor cell death and/or increase tumor cell necrosis, or all or any combination thereof.

### Some Formalities

[0023] A pharmaceutical composition comprising at least one (optionally more than one) compound, as described herein, and a pharmaceutically-acceptable carrier or excipient or diluent. A pharmaceutical composition comprising at least one (optionally more than one) compound, as described herein, or a pharmaceutically-acceptable salt, solvate, hydrate or prodrug thereof, optionally at least one compound of at least one of Formula (I), (II), (III), (IV), (V), (VI), (VII), (VIII), [X], optionally a compound(s) that reduces F₁F₀ ATP hydrolysis in a subject, and/or a composition containing at least one compound defined herein, and a pharmaceutically-acceptable carrier or excipient or diluent.

[0024] Use of a compound, specified herein, for treatment of a disease, specified herein. Use of a compound(s) defined herein, and/or use of a composition containing at least one compound defined herein, and/or use of a pharmaceutical composition defined herein, for treatment of one or more diseases or disorders specified herein. Use of a compound(s) defined herein, or a pharmaceutically-acceptable salt, solvate, hydrate or prodrug thereof, and/or use of a composition containing at least one compound defined herein, and/or use of a pharmaceutical composition defined herein, optionally a compound(s) and/or composition(s) that reduces F₁F₀ ATP hydrolysis in a subject, optionally at least one compound of at least one of Formula (I), (II), (III), (IV), (V), (VI), (VII), (VIII), [X], for treatment/amelioration/prevention/reversal/combat of one or more diseases or disorders or physiological processes (and/or one or more of its consequences) or an unwanted/undesirable aesthetic(s) specified herein.

[0025] Use of a compound(s) specified herein for the manufacture of a medicament. Use of a compound, specified herein, for manufacture of a medicament for treatment of a disease, specified herein. Use of a compound(s) defined herein, and/or use of a composition containing at least one compound defined herein, and/or use of a pharmaceutical composition defined herein, for the manufacture of a medicament for treatment of one or more diseases or disorders specified herein. Use of a compound(s) defined herein, or a pharmaceutically-acceptable salt, solvate, hydrate or prodrug thereof, and/or use of a composition containing at least one compound defined herein, and/or use of a pharmaceutical composition defined herein, optionally a compound(s) and/or composition(s) that reduces F₁F₀ ATP hydrolysis in a subject, optionally at least one compound of at least one of Formula (I), (II), (III), (IV), (V), (VI), (VII), (VIII), [X], for the manufacture of a medicament for treatment/amelioration/prevention/reversal/combat of one or more diseases or disorders or physiological processes (and/or one or more of its consequences) or an unwanted/undesirable aesthetic(s) specified herein.

[0026] A compound(s) and/or composition(s) described herein for use in a method of treatment of the human or animal body by therapy.

[0027] A compound(s) and/or composition(s) described herein for use in a method of treatment/improvement/enhancement of the human or animal body by therapy.

[0028] A method of treating, ameliorating, preventing or combating a disease or disorder by administering a therapeutically effective amount to the subject of at least one compound as defined herein. A method of treating, ameliorating, preventing or combating a disease or disorder by administering a therapeutically effective amount to the subject in need thereof of at least one compound defined as herein. A method of treating, ameliorating, preventing or combating a disease or disorder by administering to a subject in need of treatment an effective amount of at least one compound defined herein. A method of treating/ameliorating/preventing/reversing/combating one or more of a disease/disorder or physiological process (and/or one or more of its consequences) or an unwanted/undesirable aesthetic(s), specified herein, in a subject wherein the method comprises administering an effective amount to the subject of at least one compound defined herein, or a pharmaceutically-acceptable salt, solvate, hydrate or prodrug thereof, optionally at least one compound of at least one of Formula (I), (II), (III), (IV), (V), (VI), (VII), (VIII), [X], optionally a compound(s) that reduces F₁F₀ ATP hydrolysis in a subject, and/or a composition containing at least one compound defined herein, and/or a pharmaceutical composition defined herein. A method of treating/ameliorating/preventing/reversing/combating one or more of a disease/disorder or physiological process (and/or one or more of its consequences) or an unwanted/undesirable aesthetic(s), specified herein, in a subject wherein the method comprises administering an effective amount to the subject in need/want thereof of at least one compound defined herein, or a pharmaceutically-acceptable salt, solvate, hydrate or prodrug thereof, optionally at least one compound of at least one of Formula (I), (II), (III), (IV), (V), (VI), (VII), (VIII), [X], optionally a compound(s) that reduces F₁F₀ ATP hydrolysis in a subject, and/or a composition containing at least one compound defined herein, and/or a pharmaceutical composition defined herein.

[0029] Use of a compound(s) defined herein, or a pharmaceutically-acceptable salt, solvate, hydrate or prodrug thereof, and/or use of a composition containing at least one compound defined herein, and/or use of a pharmaceutical composition defined herein, optionally a compound(s) and/or composition(s) that reduces F₁F₀ ATP hydrolysis in a subject, optionally at least one compound of at least one of Formula (I), (II), (III), (IV), (V), (VI), (VII), (VIII), [X], for treatment/amelioration/prevention/reversal/combat of one or more diseases or disorders or physiological processes (and/or one or more of its consequences) or an unwanted/undesirable aesthetic(s) specified herein, in subject, wherein the administration to the subject is topical/local (not systemic). A method of treating/ameliorating/preventing/reversing/combating one or more of a disease/disorder or physiological process (and/or one or more of its consequences) or an unwanted/undesirable aesthetic(s), specified herein, in a subject, wherein the method comprises topically/locally (not systemically) administering an effective amount to the subject in need/want thereof of at least one compound defined herein, or a pharmaceutically-acceptable salt, solvate, hydrate or prodrug thereof, optionally at least one compound of at least one of Formula (I), (II), (III), (IV), (V), (VI), (VII), (VIII), [X], optionally a compound(s) that reduces F₁F₀ ATP hydrolysis in a subject, and/or a composition containing at least one compound defined herein, and/or a pharmaceutical composition defined herein.

[0030] Use of a compound(s) defined herein, or a pharmaceutically-acceptable salt, solvate, hydrate or prodrug thereof, and/or use of a composition containing at least one compound defined herein, and/or use of a pharmaceutical composition defined herein, optionally a compound(s) and/or composition(s) that reduces F₁F₀ ATP hydrolysis in a subject, optionally at least one compound of at least one of Formula (I), (II), (III), (IV), (V), (VI), (VII), (VIII), [X], for treatment/amelioration/prevention/reversal/combat of one or more diseases or disorders or physiological processes (and/or one or more of its consequences) or an unwanted/undesirable aesthetic(s) specified herein, in a subject, wherein the subject is also administered with one or more compounds or compositions approved for human use, optionally for anti-cancer use, by the United States Food and Drug Administration (FDA) and/or European Medicines Agency (EMA), optionally in the same pharmaceutical composition. A method of treating/ameliorating/preventing/reversing/combating one or more of a disease/disorder or physiological process (and/or one or more of its consequences) or an unwanted/undesirable aesthetic(s), specified herein, in a subject, wherein the method comprises administering an effective amount to the subject in need/want thereof of at least one compound defined herein, or a pharmaceutically-acceptable salt, solvate, hydrate or prodrug thereof, optionally at least one compound of at least one of Formula (I), (II), (III), (IV), (V), (VI), (VII), (VIII), [X], optionally a compound(s) that reduces F₁F₀ ATP hydrolysis in a subject, and/or a composition containing at least one compound defined herein, and/or a pharmaceutical composition defined herein, wherein the subject is also administered with an effective amount (which can be less than when administered alone) of one or more compounds or compositions approved for human use, optionally for anti-cancer use, by the United States Food and Drug Administration (FDA) and/or European Medicines Agency (EMA), optionally in the same pharmaceutical composition.

[0031] Use of a compound(s) defined herein, or a pharmaceutically-acceptable salt, solvate, hydrate or prodrug thereof, and/or use of a composition containing at least one compound defined herein, and/or use of a pharmaceutical composition defined herein, optionally a compound(s) and/or composition(s) that reduces F₁F₀ ATP hydrolysis in a subject, optionally at least one compound of at least one of Formula (I), (II), (III), (IV), (V), (VI), (VII), (VIII), [X], for treatment/amelioration/prevention/reversal/combat of one or more diseases or disorders or physiological processes (and/or one or more of its consequences) or an unwanted/undesirable aesthetic(s) specified herein, in a subject, wherein the mg/kg drug dose administered to the subject is comparable with or larger than the mg/kg dose administered to a subject of smaller bodily size (optionally a subject of another, smaller, species), which is very distinct from most drugs, and optionally the mg/kg dosage administered to adult humans is comparable or greater than the No Observed Adverse Effects Level (NOAEL) mg/kg dosage in mice housed at 22° C. A method of treating/ameliorating/preventing/reversing/combating one or more of a disease/disorder or physiological process (and/or one or more of its consequences) or an unwanted/undesirable aesthetic(s), specified herein, in a subject, wherein the method comprises administering an effective amount to the subject in need/want thereof of at least one compound defined herein, or a pharmaceutically-acceptable salt, solvate, hydrate or prodrug thereof, optionally at least one compound of at least one of Formula (I), (II), (III), (IV), (V), (VI), (VII), (VIII), [X], optionally a compound(s) that reduces F₁F₀ ATP hydrolysis in a subject, and/or a composition containing at least one compound defined herein, and/or a pharmaceutical composition defined herein, wherein the mg/kg drug dose administered to the subject is comparable with or larger than the mg/kg dose administered to a subject of smaller bodily size (optionally a subject of another, smaller, species), which is very distinct from most drugs, and optionally the mg/kg dosage administered to one or more adult humans is comparable or greater than the No Observed Adverse Effects Level (NOAEL) mg/kg dosage in mice housed at 22° C. This would greatly surprise someone of the art because it is very distinct from most other drugs, wherein bigger species are administered much lower mg/kg doses, not comparable or larger.

### Some Non-Limiting Aspects of the Teaching

[0032] In some of the most dangerous cancers, refractory to present [chemo/radio] therapies, during some or all of their cell cycle, Reactive Oxygen Species (ROS) decrease [NADPH], because NADPH is consumed in ROS mitigation processes, and this then pulls through increased pentose phosphate pathway (PPP) and glycolytic flux. But such a pivotal increase in glycolytic/PPP flux can only occur because of F₁F₀ ATP hydrolysis, a distinctive feature to these cancers, which stops ATP produced by glycolysis from accumulating and slowing glycolysis by negative feedback inhibition of key glycolytic enzymes. This increased PPP flux maintains [NADPH] and ROS mitigation. In this way, these cancers can maintain a very high ROS mitigation capability, maintain very low intracellular [ROS], and tend to be the most resistant to conventional [chemo/radio] therapies, which work, or often don't work (!), by increasing [ROS]. Compounds of this disclosure undermine this process/resistance. By inhibiting/reducing F₁F₀ ATP hydrolysis, they increase the anti-cancer efficacy of any chemical or treatment that increases Reactive Oxygen Species (ROS) in cancer cells. Some embodiments of this disclosure is any such co-treatment(s). Indeed, a compound(s) of this disclosure increases the success rate of standard of care [chemo/radio] therapies and optionally permits their use at lower dosing, which reduces their horrendous side-effects. This disclosure encompasses a compound(s) of this application, for example at least one compound of at least one of Formula (I), (II), (III), (IV), (V), (VI), (VII), (VIII), [X], in co-therapy/administration with one or more of surgery, chemotherapy, immunotherapy, immuno-oncology, radioimmunotherapy, biological therapy, hormone therapy, radiotherapy or any US Food and Drug Administration (FDA) and/or European Medicines Agency (EMA) approved drug(s) or treatment(s), for example, a drug/treatment approved for cancer therapy. In some embodiments the anti-cancer activity of a compound(s) of this disclosure, for example at least one compound of at least one of Formula (I), (II), (III), (IV), (V), (VI), (VII), (VIII), [X], adds to/synergizes with (potentiates) the anti-cancer activity of an FDA and/or EMA approved anti-cancer treatment(s) e.g. one or more of chemotherapy, radiotherapy, immunotherapy, surgery etc. In other words, their combined anti-cancer effect is greater than simply being the sum of each alone. In some embodiments, a compound(s) of this disclosure is used as an adjuvant or neoadjuvant to another cancer treatment(s) e.g. used as an adjuvant or neoadjuvant to chemo and/or radiotherapy and/or surgery. In some embodiments a compound(s) of this disclosure, for example at least one compound of at least one of Formula (I), (II), (III), (IV), (V), (VI), (VII), (VIII), [X], makes a cancer(s) more radiosensitive/less radioresistant and/or more chemosensitive/less chemoresistant i.e. more amenable to treatment by radio- and/or chemo-therapy, acts as a radiosensitizer and/or chemosensitizer. This is very valuable for treating radio- and/or chemo-resistant cancers. Chemotherapies are well known to those of the art, including, but not limited to, cisplatin, carboplatin, taxol, oxaliplatin etc, and tend to be (very) toxic. Encompassed herein is a method of reducing, treating and/or preventing adverse or undesired effects associated with conventional therapy including, but not limited to, chemotherapy, radiotherapy, immunotherapy, wherein a compound(s) provided herein, e.g. a compound(s) of one or more of Formula (I), (II), (III), (IV), (V), (VI), (VII), (VIII), [X], or a pharmaceutically acceptable salt, solvate, hydrate, prodrug thereof, is administered to a subject prior to, during, or after the occurrence of the adverse effect associated with conventional therapy, optionally wherein the dosage/frequency/use of the conventional therapy is decreased. In certain embodiments, a compound(s)/composition(s) disclosed herein can be administered to a subject in combination/co-therapy with one or more monoclonal antibodies such as one or more cancer immunotherapy monoclonal antibodies known in the art, including, but not limited to, at least one “checkpoint inhibitor” monoclonal antibody. In other embodiments, a compound(s) of this disclosure is used as cancer therapy alone.

### Body Temperature

[0033] Administered to a subject, a F₁F₀-ATP hydrolysis inhibitor(s) conserves ATP, so less ATP needs to be synthesized, therefore respiration rate slows, thence metabolic heat production declines and body temperature can fall towards ambient temperature (if ambient<body temperature). So, when the ambient temperature isn't arduous (not requiring significant energy consuming physiological/behavioural adaptations to maintain body temperature) and dietary intake stays constant, weight gain/maintenance can occur, which can assist cachexia, for example cancer driven cachexia. This is clinically valuable because cachexia is the leading cause of death in cancer patients. If the ambient temperature is sufficiently close to the required body temperature, then the aforementioned decrease in heat generation is safe, because the body temperature can't fall below the ambient temperature. So, for example, if the ambient temperature is 37° C., inhibiting F₁F₀-ATP hydrolysis could make body temperature fall to this ambient temperature, but not below it, and this is safe because ˜37° C. body temperature is safe. Inhibiting F₁F₀-ATP hydrolysis will reduce, but not abolish, metabolic heat production. So, body metabolism will still contribute to heating the body, just less so, which will shift the thermoneutral and thermal comfort zones (terms well known to those of the art [6], temperatures vary by species, as is well known to those of the art) to higher temperature(s). If the subject is located at a higher temperature to account for this shift, for example at their updated, higher thermoneutral temperature, or make behavioural adaptations (e.g. wearing more clothes), then this shift is harmless. An embodiment of this disclosure is setting the dosage of a compound(s) that inhibits F₁F₀ ATP hydrolysis with consideration of the ambient temperature, wherein higher dosages are permissible at higher ambient temperatures. The preferred ambient temperature for a dosage permits the subject to be thermoneutral, and/or thermal comfortable, without the metabolic heat (respiration) fraction driven by the F₁F₀ ATP hydrolysis that is lost because of this dosage. This temperature management issue is more important for smaller than larger animals, because surface area scales to mass by a fractional power (e.g. refer Kleiber's law) and so larger animals retain their generated heat better, and so a given percentage drop in (per unit mass) metabolism will cause a smaller drop in body temperature in a bigger animal. The aforementioned weight gain can be of great clinical/health/nutritional value, or aesthetic value (by non-limiting example: bodybuilders), or commercial value when applied to livestock/farm animals or any animal with a commercial value e.g. racing animals, such as horses. This disclosure encompasses a method/process of using a compound(s) of this disclosure for these applications, or any others wherein weight, nutritional or energetic gain is wanted in an animal or human.

[0034] In an embodiment, the amplitude of hypothermia is controlled by setting the ambient temperature, wherein an effective amount of administered F₁F₀ ATP hydrolysis inhibitor reduces subject body temperature to slightly higher than ambient temperature, and so hypothermic amplitude is controlled by controlling ambient temperature. Another embodiment is that the body temperature that the body falls to, upon administration of an effective amount of F₁F₀ ATP hydrolysis inhibitor, is controlled by controlling feature(s) of electromagnetic radiation upon the subject, for example emergent from a radiation heater(s), optionally controlled by servocontrol, with the set point set at the desired hypothermic body temperature, used as a body heating system alone or in combination with other body warming devices and methods (many possibilities known to those of the art), which are optionally controlled by servocontrol, optionally integrated into the same control loop, optionally used by themselves alone or in combination for this body heating purpose, to “catch” and offset the hypothermic drive, of an effective amount of F₁F₀ ATP hydrolysis inhibitor(s) in the body, at some desired hypothermic body temperature.

[0035] Componentry to this disclosure is any method in which a subject is administered with an effective amount of a compound(s) of this disclosure, for example a compound(s) of Formula [X], and/or a compound(s) selected from one or more of Formula (I), (II), (III), (IV), (V), (VII), (VIII), and/or any compound(s) that selectively/preferentially inhibits F₁F₀ ATP hydrolysis, and/or a pharmaceutically-acceptable salt, solvate, hydrate or prodrug thereof, and/or a pharmaceutical composition thereof, to reduce their body temperature. For any purpose. Or for no purpose at all. Or to make animals/humans feel more comfortable in hot weather, climates and geographies.

Methods to Find Further Compounds Componentry to this Disclosure

[0036] A method to find a compound(s) of this disclosure is by screening for/seeking a compound(s) that preferentially inhibits the reverse mode of ATP synthase. For example, by separately assaying (in space and/or time) a compounds's effect upon ATP synthesis and ATP hydrolysis by ATP synthase (in its entirety or, less preferably, a component part of it). Then comparing these assay results. The greater the inhibition of reverse vs. forward mode, the more preferred a compound is for at least one use of this disclosure. To illustrate, by the teaching of this disclosure, the greater a compound inhibits the reverse vs. forward mode of ATP synthase, the more preferred this compound is for anti-cancer and/or anti-aging use. A disclosure embodiment is the process/method of seeking a new compound(s) of this disclosure by assaying whether a candidate molecule can depolarise Ψ_{IM}, when Ψ_{IM} is maintained by F₁F₀ ATP hydrolysis (e.g. when OXPHOS is blocked by a respiratory chain inhibitor(s) or insufficient O₂), but that can't hyperpolarize Ψ_{IM} and/or decrease O₂ consumption, when Ψ_{IM} is maintained by proton pumping by complexes of the respiratory chain. Such an assay is described in [7]. A further method is screening a number of compounds to find one or more with this activity in this assay. A disclosure embodiment is seeking a compound(s) of this disclosure by assaying whether a candidate molecule inhibits/reduces ATP hydrolysis more than ATP synthesis in Sub-Mitochondrial Particles (SMPs), wherein a further method is screening a number of compounds to find one or more with this activity in this assay. ATP hydrolysis can be assayed by (non-limiting example) a spectroscopic assay for NADH fluorescence that incubates the SMPs with pyruvate kinase and lactate dehydrogenase enzymes (assay well-known to those of the art). ATP synthesis can be assayed by (non-limiting example) a spectroscopic assay for NADPH fluorescence that incubates the SMPs with hexokinase and glucose-6-phosphate dehydrogenase enzymes (assay well-known to those of the art). These assays are reported in in any one of [8, 9, 10, 11, 7, 12, 13], and/or as referenced therein, all of which are herein incorporated in their entirety. In these SMP assays, the criteria for a candidate anti-cancer compound is a low EC₅₀ against ATP hydrolysis (thence anti-cancer activity) and a higher EC₅₀ against ATP synthesis (thence safe for normal cells). These SMP assays deliver high signal-to-noise because non-specific protein inhibiting compounds (Pan-assay interference compounds, PAINS), which are the bane of drug discovery screening assays, inhibit both ATP hydrolysis and synthesis, and thus are dismissed by the screening algorithm. So, the screening assay inherently screens out PAINS. This is distinctive and valuable.

[0037] In preferred embodiments, the SMP assay is conducted at alkaline pH (e.g. pH 8). In some embodiments, endogenous/native IF1 protein is removed as a preliminary step of the SMP assay. But in alternative embodiments (more preferred) it is not removed. Which permits the finding of compounds that inhibit F₁F₀ ATP hydrolysis indirectly, by acting upon IF1 protein rather than ATP synthase: by acting to break up IF1 protein tetramers (and higher oligomers; which cannot inhibit F₁F₀ ATP hydrolysis), releasing IF1 protein dimers/monomers, which can inhibit F₁F₀ ATP hydrolysis.

[0038] Componentry to this disclosure is screening, using one or more screening assays herein described, compound(s) from one or more compound collections/libraries known to, or findable by, one of the art, optionally a proprietary compound collection(s) {optionally a collection(s) or sub-collection(s) that belongs to, or is sourced from, a major/multinational pharmaceutical company and/or a pharmaceutical company with >$50 million in annual sales and/or a Contract Research Organisation [CRO, illustrative example would be Charles River Laboratories]} and/or a publically/commercially available compound collection(s) (or a fraction thereof), for example, without limitation, eMolecules, Zinc, MMsINCdatabase, Pubchem, Chemspider, chEMBL, Chemical Structure Lookup Service, CoCoCo, Broad Institute compound collection(s), NIH Molecular Libraries Probe Production Centers Network (MLPCN), Joint European Compound library at the European Lead factory, ScreeningPort at Fraunhofer Institute for Molecular Biology and Applied Ecology (IME), Microsource Spectrum collection (contains human approved/trialed drugs), a screening library from Chembridge Inc., San Diego, CA, USA or a similar company (numerous such companies are known to those of the art) and/or by a compound collection/library generated by “diversity-oriented synthesis” and/or by one of the art. A combinatorial library, generated by combinatorial chemistry, may be used, wherein these terms are well known in the art (e.g. refer PCT/US94/08542, EP0774464, U.S. Pat. Nos. 5,798,035, 5,789,172, 5,751,629); and refer to patents with the combinatorial chemistry: sub-class “C40B” in the International Patent Classification; refer GLARE software, available on sourceforge.net website, for combinatorial library design).

[0039] Componentry to this disclosure is screening, using one or more screening assays herein described, linear/cyclic (optionally bicyclic, or higher cycle number) peptides using a method(s) of one or more of PCT/US91/08694, PCT/US91/04666, WO2009/098450, U.S. Pat. No. 8,680,022B2, U.S. Pat. No. 9,657,288B2, U.S. Ser. No. 10/501,496B2 or similar, or a method(s) found in a patent application/patent that cites one or more of the aforementioned filings.

[0040] A method to find antibody embodiment(s) of this disclosure is to raise antibodies against an ATP synthase component(s), and/or the entirety of ATP synthase, and then assay each in one or more of the aforementioned assays, looking for the ability to preferentially/specifically inhibit F₁F₀ ATP hydrolysis as compared to F₁F₀ ATP synthesis. A disclosure embodiment is to administer a nucleotide sequence coding for such an antibody to a subject, optionally by gene therapy, optionally wherein this antibody coding gene is integrated into the subject's genome in one or more cells, optionally into the subject's mitochondrial DNA (mtDNA) in one or more cells. In an embodiment, one or more antibody embodiments of this disclosure, and/or one or more nucleotide sequences encoding one or more of such antibodies, are administered to a subject to convey to them therapy/enhancement, optionally cancer treatment/amelioration/prevention/combat, optionally wherein one or more of said nucleotide sequences are incorporated into the subject's genome, and/or mitochondrial DNA, in one or more of their cells, optionally wherein the expression of this nucleotide sequence, to protein(s), is limited to a certain cell type/tissue type/organ/area/sub-section of the subject, optionally by the character of the promotor region incorporated with the protein(s) coding sequence and/or by where the sequence is targeted to insert into the genome and/or by where in the subject the nucleotide sequence (optionally in a vector) is introduced and/or by the nature of the vector selected. Incidentally, a disclosure embodiment is for an ATP synthase component(s)/entirety to be administered to a subject, optionally via intravenous administration, wherein this acts as an epitope in the subject, wherein the subject produces antibodies against it, which then convey therapy/enhancement to the subject. What the terms “antibody” and “antibodies” can refer to, and how to produce them (illustrative e.g. refer US2008/0089950A1, Methods and compositions for modulating the immune system and uses thereof, Lan Bo Chen is one of the inventors, also refer to the patents and publications that it cites), is well known in the art and can include, without restriction, monoclonal antibodies, multispecific antibodies, human antibodies, humanized antibodies, camelised antibodies, chimeric antibodies, single domain antibodies, single-chain FVS (ScPv), single chain antibodies, Fab fragments, F(ab′) fragments, disulfide-linked FVs (sdFv), and anti-idiotypic (anti-Id) antibodies, and epitope-binding fragments of any of the above. In particular, antibodies include immunoglobulin molecules and immunologically active fragments of immunoglobulin molecules, i.e., molecules that contain an antigen binding site. Immunoglobulin molecules can be of any type (e.g., IgG, IgE, IgM, IgD, IgA and IgY), class (e.g., IgG₁, IgG₂, IgG₃, IgG₄, IgA₁ and IgA₂) or subclass.

[0041] The present teaching isn't limited to a particular type of compound. In certain embodiments, a compound of the present teaching can be, but isn't limited to, an inorganic molecule, organic molecule, small organic molecule, small molecule, drug compound, large molecule, nucleic acid, LNA (locked nucleic acid), polynucleotide, oligonucleotide, DNA molecule, gene, protein coding sequence of DNA and/or RNA, plasmid, virus, morpholino, RNA molecule, mRNA, hairpin RNA, siRNA (small interfering RNA), miRNA, antagomir, ribozyme, aptamer, amino acid, amino acid chain, peptide, cyclic peptide, bicyclic peptide, tricyclic (or higher number of cycles) peptide, peptidomimetic, polypeptide, protein, fusion protein, glycopeptide, glycoprotein, antibody, antibody fragment, antibody-drug conjugate, PNA (peptide nucleic acid), lipid, sugar, carbohydrate.

### In Claim Format:

[0042] A method of identifying a compound(s)/agent(s) to treat/ameliorate/prevent/combat a disease/disorder/physiological process (and/or one or more of its consequences) selected from: any disease/disorder/physiological process (and/or one or more of its consequences) mentioned herein in this disclosure (in its entirety);
[0043] comprising:
[0044] independently assaying the compound's effect upon ATP synthesis and ATP hydrolysis by ATP synthase; preferably in vitro; preferably in Sub-Mitochondrial Particles (SMPs); wherein a desired/sought compound inhibits/reduces ATP hydrolysis more than it inhibits/reduces ATP synthesis (by ATP synthase), wherein greater disparity is more preferred; optimally where there is a sizeable differential between a compound's EC₅₀ F₁F₀ ATP synthesis and a smaller valued EC₅₀ F₁F₀ ATP hydrolysis, for example (in order of increasing preference) one or more of >10, >100, >1000, >5000, >10000 times difference; optionally wherein a number of different compounds, optionally from a compound library/libraries, optionally one or more compounds of Formula [X] herein, optionally one or more compounds of one or more of Formula (I), (II), (III), (IV), (V), (VI), (VII), (VIII) herein, are independently tested in this assay, screening/selecting for a compound(s) that inhibits/reduces ATP hydrolysis more than it inhibits/reduces ATP synthesis (by ATP synthase), wherein one or more compounds with this characteristic are selected, especially (but not restrictively) if smaller than 800 Daltons; preferably wherein these selected compounds are ranked according to which have the greatest differential between their EC₅₀ F₁F₀ ATP synthesis and their smaller valued EC₅₀ F1F0 ATP hydrolysis, wherein one or more of the most highly ranked are selected for further optional step(s) of this claim; optionally wherein one or more compounds (and/or analogue/homolog/derivative/salt/solvate/hydrate/prodrug thereof) selected by the aforementioned step is combined with at least one of a pharmaceutically-acceptable carrier(s), additive(s), diluent(s) to produce/manufacture a pharmaceutical composition(s); optionally wherein this selected compound(s)/composition(s) is used to treat/ameliorate/prevent/combat, in a subject (by administering an effective amount), a disease or disorder or physiological process (and/or one or more of its consequences) aforementioned in this claim (i.e. any disease/disorder/physiological process (and/or one or more of its consequences) mentioned herein in this disclosure (in its entirety));
[0045] optional use of this selected compound(s)/composition(s) in the manufacture of a medicament to treat/ameliorate/prevent/combat a disease or disorder or physiological process (and/or one or more of its consequences) aforementioned in this claim (i.e. any disease/disorder/physiological process (and/or one or more of its consequences) mentioned herein in this disclosure (in its entirety).

### Yeast Two-Hybrid Screen

[0046] [14] built a yeast construct wherein the DNA-binding and transcriptional activator domains of yeast Gal4 transcription factor were divided and associated with Myc and Max. When Myc and Max were free to combine by their known protein-protein interaction, then there was a read out of this association by expression of the β-galactosidase reporter gene. Using this system they screened for compounds that could disrupt the Myc and Max protein-protein interaction. Wherein such a compound stops expression of the β-galactosidase reporter gene (and without it these yeast cannot utilize galactose). In the same way, the DNA-binding and transcriptional activator domains of yeast Gal4 transcription factor can each be associated with an IF1 protein. And this system can then screen for compounds that disrupt IF1 protein dimerization. A compound that can disrupt IF1 protein dimerization in turn prevents IF1 protein tetramerization, therein preventing IF1 protein inactivation by its tetramerization (and higher oligomerization) at pH 8 (normal pH of mitochondrial matrix), wherein an IF1 monomer can (potently) inhibit F₁F₀ ATP hydrolysis. So, this is a screen for compounds that can increase IF1 protein inhibition of F₁F₀ ATP hydrolysis at pH 8 (normal pH of mitochondrial matrix). Note that the yeast nucleus is not at pH 8. But then it doesn't need to be for this screen to work. Because IF1 protein dimerization is not (at least not strongly) pH dependent. Compounds selected by this yeast 2-hybrid screen, which is extremely high throughput, can then be tested in an aforementioned Sub-Mitochondrial Particle (SMP) assay (at pH 8 and wherein endogenous/native IF1 is not depleted beforehand). Wherein if they don't reduce F₁F₀ ATP hydrolysis in this SMP assay, they can be discounted. And, optionally, if they do reduce F₁F₀ ATP hydrolysis, but also reduce F₁F₀ ATP synthesis by a sizeable degree also, they can also be discounted.

Some Cancer Types Especially Targeted by this Teaching

[0047] This application discloses a method of using a compound(s) that preferentially inhibits/reduces the ATP-hydrolysing mode of ATP synthase, for example at least one compound of at least one of Formula (I), (II), (III), (IV), (V), (VII), (VIII), [X], or a pharmaceutically-acceptable salt, solvate, hydrate or prodrug thereof, to treat/ameliorate/prevent/combat a cancer, especially a cancer that preferentially uses glycolytic rather than oxidative metabolism, for example a cancer exhibiting the Warburg effect.

[0048] A compound of the present disclosure can treat adult cancer, childhood/pediatric cancer, cancer in a child/adolescent, cancer that causes/drives cachexia, cancer occurring/associated with inflammation and/or with Tumour Associated Macrophages (TAMs), chemotherapy and/or radiotherapy and/or immunotherapy resistant/refractory cancer, tumour growth, metastasis, metastatic cancer, non-metastatic cancer, treat a cancer that has spread to the lymph nodes (a “lymph node positive”/“node-positive” cancer), treat a cancer that has not spread to the lymph nodes (a “lymph node negative”/“node-negative” cancer), treat tumour implantation, treat cancer at all clinical stages (e.g. at any stage within stages I-IV, treating pre-cancer in Stage 0 also, e.g. at any stage in the Tumor Node Metastasis [TNM] staging system), treat all grades (e.g. Grades I-III of cancer) of cancer, treat cancer of all degrees of differentiation/de-differentiation/undifferentiation, are useful as an adjunct to chemo-/radio-therapy, treat cancers including, but not limited to, solid tumour/tumor, blood borne tumour/tumor, hematological malignancy, malignancy, advanced malignancy, multiple brain metastase, poor prognosis malignant brain tumor, metastatic hepatocellular carcinoma, hepatocellular carcinoma, liver cancer, primary liver cancer, mesothelioma, malignant melanoma, malignant mesothelioma, malignant pleural effusion mesothelioma syndrome, neuroendocrine tumor, amyloidosis, meningioma, hemangiopericytoma, chondrosarcoma, neurofibroma, Ewing's sarcoma, malignant fibrous histiocytoma of bone/osteosarcoma, osteosarcoma, rhabdomyosarcoma, heart cancer, brain cancer, astrocytoma, neuronal & mixed neuronal-glial tumors, glioma, brainstem glioma, pilocytic astrocytoma, ependymoma, HPV induced/driven/caused/associated/related cancer/tumor, oncogenic DNA virus induced/driven/caused/associated/related cancer, primitive neuroectodermal tumor, craniopharyngioma, cerebellar astrocytoma, cerebral astrocytoma, malignant glioma, recurrent malignant glioma, medulloblastoma, neuroblastoma, schwannoma, oligodendroglioma, anaplastic oligodendroglioma, pineal astrocytoma, anaplastic astrocytoma, pituitary adenoma, visual pathway and hypothalamic glioma, glioblastoma, glioblastoma multiforms, breast cancer, hormone resistant breast cancer, invasive ductal carcinoma, ductal carcinoma in situ (DCIS), invasive lobular carcinoma, tubular carcinoma, invasive cribriform carcinoma, medulloblastoma, medullary carcinoma, male breast cancer, phyllodes tumor, inflammatory breast cancer, adrenocortical carcinoma, islet cell carcinoma, multiple endocrine neoplasia syndrome, parathyroid cancer, pheochromocytoma, thyroid cancer, medullary thyroid carcinoma, papillary thyroid carcinoma, follicular thyroid carcinoma, merkel cell carcinoma, intraocular melanoma, retinoblastoma, ocular neoplasm, anal cancer, appendix cancer, cholangiocarcinoma, carcinoid tumor, colon cancer, extrahepatic bile duct cancer, gallbladder cancer, gastric/stomach cancer, gastrointestinal cancer, gastrointestinal carcinoid tumor, gastrointestinal stromal tumor (GIST), hepatocellular cancer, pancreatic cancer, rectal cancer, bladder cancer, cervical cancer, endometrial cancer, extragonadal germ cell tumor, ovarian cancer, ovarian epithelial cancer (surface epithelial-stromal tumor), ovarian germ cell tumor, uterine cancer, penile cancer, renal cell carcinoma, renal pelvis and ureter, transitional cell cancer, prostate cancer, androgen independent prostate cancer, androgen dependent stage IV non-metastatic prostate cancer, hormone-refractory cancer, hormone-insensitive prostate cancer, hormone resistant prostate cancer, chemotherapy-insensitive prostate cancer, castration-resistant prostate cancer (CRPC), testicular cancer, gestational trophoblastic tumor, ureter and renal pelvis, genitourinary cancer, transitional cell cancer, urethral cancer, uterine sarcoma, vaginal cancer, vulvar cancer, wilms tumor, esophageal cancer, head and neck cancer, nasopharyngeal carcinoma, oral cancer, oropharyngeal cancer, paranasal sinus and nasal cavity cancer, pharyngeal cancer, salivary gland cancer, hypopharyngeal cancer, acute biphenotypic leukemia, acute eosinophilic leukemia, acute lymphoblastic leukemia (ALL), acute myeloid leukemia (AML), chronic myeloid leukemia (CML), acute myeloid dendritic cell leukemia, karotype acute myeloblastic leukemia, primary myelofibrosis, myelodysplastic syndromes (MDS), myeloid sarcoma, myeloproliferative neoplasms (MPNs), lymphoma, AIDS-related lymphoma, anaplastic large cell lymphoma, angioimmunoblastic T-cell lymphoma, B-cell prolymphocytic leukemia, low grade follicular lymphoma, Burkitt's lymphoma, chronic lymphocytic leukemia (CLL), chronic myelogenous leukemia, cutaneous B-Cell lymphoma, cutaneous T-cell lymphoma, diffuse large B-cell lymphoma, follicular lymphoma, hairy cell leukemia, hepatosplenic T-cell lymphoma, Hodgkin's lymphoma, non-Hodgkin's lymphoma, hairy cell leukemia, intravascular large B-cell lymphoma, large granular lymphocytic leukemia, lymphoplasmacytic lymphoma, lymphomatoid granulomatosis, mantle cell lymphoma, marginal zone B-cell lymphoma, mast cell leukemia, mediastinal large B cell lymphoma, multiple myeloma/plasma cell neoplasm, myelodysplastic syndromes, mucosa-associated lymphoid tissue lymphoma, mycosis fungoides, nodal marginal zone B cell lymphoma, non-Hodgkin lymphoma, precursor B lymphoblastic leukemia, primary central nervous system lymphoma, primary cutaneous follicular lymphoma, primary cutaneous immunocytoma, primary effusion lymphoma, plasmablastic lymphoma, Sézary syndrome, splenic marginal zone lymphoma, T-cell prolymphocytic leukemia, basal-cell carcinoma, melanoma, skin cancer (non-melanoma), bronchial adenomas/carcinoids, small cell lung cancer, mesothelioma, Non-Small Cell Lung Cancer (NSCLC), tobacco-associated NSCLC, pleuropulmonary blastoma, adenocarcinoma, rectal adenocarcinoma, unresectable colorectal carcinoma, laryngeal cancer, thymoma and thymic carcinoma, peritoneal carcinoma, peritoneal cancer, papillary serous carcinoma, AIDS-Related Cancers (ADCs), Kaposi sarcoma, Non-Hodgkin lymphoma (NHL), Burkitt's lymphoma, Burkitt's-like lymphoma, diffuse large B-cell lymphoma (DLBCL), Non-AIDS Related Cancers (NADCs), Hodgkin lymphoma (HL), epithelioid hemangioendothelioma (EHE), desmoplastic small round cell tumor, leiomyoma, leiomyosarcoma, Liposarcoma, fallopian tube cancer, smoldering myeloma, indolent myeloma, Waldenstrom's macroglobulinemia, fibrodysplasia ossificans progressive, breast carcinoma, non-small cell lung carcinoma, ovarian carcinoma, pancreatic carcinoma, prostate carcinoma, colorectal cancer, colorectal carcinoma, squamous cell carcinoma, hepatocellular carcinoma benign prostatic hyperplasia (BPH) and polycystic ovary syndrome, dedifferentiated chordoma, any neoplasm disclosed by the International Classification of Diseases (ICD) in ICD-10 Chapter II: Neoplasms (World Health Organisation, WHO) and/or the International Classification of Diseases for Oncology (WHO).

[0049] A compound of the present disclosure can treat cancers including, but not limited to, those that originate in, or spread to, the testis, cerebral cortex, cerebellum, skin, fallopian tube, parathyroid gland, small intestine, large intestine, caecum, kidney, skeletal muscle, muscle, connective tissue, synovium, duodenun, spleen, epididymis, bone, bone marrow, lymphoid, peripheral blood, blood, lymph node, adrenal gland/cortex, esophagus, thyroid gland, heart muscle, tonsil, lung, bronchus, pleura, retroperitoneal, prostate, rectum, anus, adipose tissue, colon, stomach, cervix, gallbladder, seminal vesicle, breast, ovary, endometrium, vulva, smooth muscle, salivary gland, pancreas, urinary bladder, blood, brain, gum, mouth, throat, liver, nasopharynx, other pharynx, pharynx, larynx, neck, tongue, uterus, penis, vagina, chest, eye, retina, head, neck, lip, oral cavity.

[0050] A compound of the present disclosure can treat adenomas, carcinomas, leukemias, lymphomas, melanomas, myelomas, sarcomas, and teratomas.

[0051] As shown by anti-cancer activity against the cancer cell lines used in NCI-60 testing at the National Cancer Institute (NCI, USA), a compound of this disclosure, which inhibits/reduces F₁F₀ ATP hydrolysis, can treat cancers including, but not limited to, cancer originating in one of peripheral blood, bone marrow, lung, colon, Central Nervous System (CNS), brain, skin, ovary, kidney, prostate, breast/mammary gland; including metastatic forms of these cancers; cancer found in lymph node/bone/soft tissue/metastatic site(s) and/or found in/causing pleural effusion, ascites; Carcinoma, Adenocarcinoma, Squamous cell carcinoma, Large cell carcinoma, Cystadenocarcinoma, Clear cell carcinoma, Sarcoma, Blastoma, cancer of epithelial/fibroblast/promyeloblast/lymphoblast/T lymphoblast/B lymphocyte cell type, Multi Drug Resistant (MDR) cancer, Anaplastic cancer, Hematopoietic cancer, Acute Lymphoblastic Leukemia (ALL), Childhood/Adult T acute lymphoblastic leukemia, Precursor T-cell acute lymphoblastic leukemia, Acute Myeloid Leukemia (AML), Acute promyelocytic leukemia, Chronic Myeloid Leukemia/Chronic Myelogenous Leukemia (CML), CML in blast crisis, Cancer with Philadelphia chromosome (BCR-ABL1 positive), Myeloma, Multiple myeloma, Plasma cell myeloma, Plasmacytoma, Lymphoma, Large cell immunoblastic lymphoma, Anaplastic large cell lymphoma, ALK-positive anaplastic large cell lymphoma, ALK positive cancer, Non-Small Cell Lung Cancer (NSCLC), lung carcinoma, lung adenocarcinoma, Minimally invasive lung adenocarcinoma, Non-small cell lung carcinoma, lung squamous cell carcinoma, Mesothelioma, Pleural epithelioid mesothelioma, Pleural mesothelioma, Bronchioalveolar carcinoma, Large cell lung cancer, Large cell lung carcinoma, Colon carcinoma, Colorectal carcinoma, Colon adenocarcinoma, Colorectal adenocarcinoma, Dukes' type C colorectal adenocarcinoma, Dukes' type D colorectal adenocarcinoma, Astrocytoma, Glioblastoma, Gliosarcoma, Glioblastoma multiforme, Melanoma, Malignant melanoma, Cutaneous melanoma, Amelanotic melanoma, Ovarian adenocarcinoma, Ovarian endometrioid adenocarcinoma, Endometrioid carcinoma of ovary, High grade ovarian serous adenocarcinoma, Ovarian serous cystadenocarcinoma, Renal cell carcinoma, Renal cell adenocarcinoma, Papillary renal cell carcinoma, Clear cell renal cell carcinoma, Clear cell renal carcinoma, Multi Drug Resistant (MDR) renal cancer, Prostate carcinoma, Prostate adenocarcinoma, Androgen Receptor negative (AR−) prostate cancer, Breast carcinoma, Breast adenocarcinoma, Ductal carcinoma, Invasive ductal carcinoma, Luminal A breast cancer, Estrogen Receptor positive (ER+) breast cancer, Progesterone Receptor positive (PR+) breast cancer, Hormone Receptor positive (HR+) breast cancer, Hormone responsive breast cancer, Triple Negative Breast Cancer (TNBC), Hormone Receptor negative (HR−) breast cancer, Hormone resistant breast cancer, Estrogen Receptor negative (ER−) breast cancer, Progesterone Receptor negative (PR−) breast cancer, HER2 negative (HER2−) breast cancer.

Local Administration of a Compound(s) of this Disclosure, Optionally for Cancer Treatment

[0052] In some disclosure embodiments a compound(s) of this disclosure, optionally a compound(s) of at least one of Formula (I), (II), (III), (IV), (V), (VI), (VII), (VIII), [X], or a pharmaceutically-acceptable salt, solvate, hydrate or prodrug thereof, is administered to a subject locally rather than systemically, optionally to convey therapy, optionally to treat/ameliorate/prevent/combat cancer in a subject, optionally wherein the local administration is to the cancer(s) itself. For non-limiting example, wherein the local administration is to a skin cancer(s) and/or pre-cancer, optionally basal-cell skin cancer (BCC), squamous-cell skin cancer (SCC), melanoma, dermatofibrosarcoma protuberans, Merkel cell carcinoma, Kaposi's sarcoma, keratoacanthoma, spindle cell tumor, sebaceous carcinoma, microcystic adnexal carcinoma, Paget's disease of the breast, atypical fibroxanthoma, leiomyosarcoma, angiosarcoma, hemangioma, Melanocytic nevus, Bowen's disease, Actinic keratoses, optionally administered via a liquid/solution/cream/lotion/ointment/emulsion/foam/spray/patch/transdermal patch/adhesive bandage/time release technology or some other drug administration route known to one of the art. Skin cancer is the most prevalent cancer globally. This local drug administration can locally reduce F₁F₀ ATP hydrolysis, thence F₁F₀ ATP synthesis, oxidative phosphorylation rate and metabolic heat generation, which is not detrimental when ambient temperature is 37° C., and not detrimental when ambient temperature is lower because heat transfer from the rest of the body, especially via blood flow, maintains the drug administered area at or near 37° C.

[0053] In a disclosure embodiment, one or more F₁F₀ ATP hydrolysis inhibitors of this disclosure, or a pharmaceutically-acceptable salt, solvate, hydrate or prodrug thereof, are administered to a subject topically/locally rather than systemically, optionally to a cancer(s) or close to a cancer(s) or to a blood vessel perfusing a cancer(s), wherein this cancer can be a tumour, and thence the compound(s) conferred reduction in heat generation (and slower aging) is disproportionally applied to this localized region, wherein its lesser heat generation is offset by heat transfer from surrounding body area(s), especially given the heat distributing nature of blood flow. In a particular embodiment, the cancer is suspected rather than diagnosed. In an embodiment, a compound(s) of this disclosure is applied topically to the skin, optionally to a skin cancer(s).

### Aging

[0054] An embodiment is a method in which a subject takes or is administered an effective amount of a compound(s) of this disclosure, for example at least one compound of at least one of Formula (I), (II), (III), (IV), (V), (VII), (VIII), [X], and/or another compound(s) that selectively inhibits F₁F₀ ATP hydrolysis, and/or a pharmaceutically-acceptable salt, solvate, hydrate or prodrug thereof, to slow their aging and/or delay the onset and/or delay/slow the progression of an age-related disease(s) and/or condition(s) and/or to extend the lifespan (and/or healthspan) of the subject (e.g. relative to the lifespan of a control subject(s) {optionally a mean/median/mode of a number of control subjects} of the same species), and/or to treat/ameliorate/prevent/combat an accelerated aging disease or progeroid syndrome. It is to be understood that “age-related” refers to diseases/disorders/conditions frequently associated with aging, however, a given subject need not be of advance age, but rather the methods, compounds and compositions of this disclosure can be used regardless of the subject's age.

[0055] Not only does an F₁F₀ ATP hydrolysis inhibitor compound of this disclosure treat/ameliorate/combat cancer in a subject, it also prevents cancer in a subject, which is distinct from many other cancer treatments (e.g. radiotherapy) which are a drive to further cancer, and so compounds of this disclosure are especially preferred for cancer treatment in children (pediatric cancers), who have enough lifespan left for secondary cancers, as a result of radiotherapy for example 1151, to be a very severe concern. Also it is noteworthy that compounds of this disclosure both treat cancer and slow aging, whereas many present cancer treatments accelerate aging 1161, causing greater incidence of age related disease(s) and ailments.

[0056] An anti-aging compound does one or more of slowing/reversing aging, slowing/reversing a sign(s) of aging, extending lifespan and/or healthspan, delaying/preventing/treating one or more diseases that have an increased incidence with age (such as the neurodegenerative diseases), treating accelerated aging diseases. Any anti-aging compound that targets/inhibits F₁F₀ ATP hydrolysis is componentry to this disclosure, preferably those that preferentially inhibit F₁F₀ ATP hydrolysis as compared to F₁F₀ ATP synthesis, and most preferably those that don't inhibit F₁F₀ ATP synthesis at all. This application discloses numerous such drug examples, many of which are also new compositions of matter, and discloses rationale and methods to find further drug examples (e.g. SMP studies, looking for compounds that inhibit F₁F₀ ATP hydrolysis more than F₁F₀ ATP synthesis), which are, in turn, encompassed and componentry to this disclosure, for example for an anti-aging use, or for other disclosed use(s) herein.

### Anti-Aging Skin Cream

[0057] F₁F₀ ATP hydrolysis inhibitor compound(s) of this disclosure slow aging but can reduce body temperature. A disclosure embodiment is to target an F₁F₀ ATP hydrolysis inhibitor compound(s) to a part/area of the subject/body where slower aging is desired, optionally for aesthetic/cosmetic or medical/therapeutic desire or need. This body part or area will have slower aging and lesser heat production, but heat transfer from surrounding body areas (especially via blood flow) will maintain the temperature of this body part/area at an acceptable value. So, the temperature issue is mitigated and slower aging endures in that body part/area. A disclosure embodiment is a method in which a subject takes or is administered an effective amount of a compound(s) of this disclosure, for example at least one compound of at least one of Formula (I), (II), (III), (IV), (V), (VII), (VIII), [X], and/or another compound(s) that selectively inhibits F₁F₀ ATP hydrolysis, or a pharmaceutically-acceptable salt, solvate, hydrate or prodrug thereof, to treat/ameliorate/prevent/combat skin aging, optionally administered to the skin, optionally by skin and/or subcutaneous injection/implant, optionally as a skin cream, optionally to the face. In another embodiment, administered to the scalp and/or hair, optionally in a hair treatment, optionally in a shampoo, to treat/ameliorate/prevent/combat hair follicle and hair aging/loss/greying/baldness. All means of applying a compound(s) of this disclosure to the skin, and/or scalp and/or hair are contemplated by, and componentry to, this disclosure.

Some Cosmetic/Aesthetic Embodiments of this Disclosure

[0058] A F₁F₀ ATP hydrolysis inhibitor compound(s), optionally at least one compound of at least one of Formula (I), (II), (III), (IV), (V), (VI), (VII), (VIII), [X], and/or a salt, solvate, hydrate, prodrug, precursor, liposome, nanoparticle (e.g. lipid nanoparticle, LNP) or other vector of the art thereof, and/or a pharmaceutical/cosmetic composition/formulation thereof, as the entirety, or as at least one component/ingredient, of a cosmetic;

[0059] For non-limiting example, a cosmetic wherein one or more of the following features apply to it (all combinations contemplated except those that are mutually exclusive):

[0060] Optionally wherein the cosmetic also contains:
[0061] one or more ingredients in a cosmetic for sale in the USA/Canada/European Union/Japan/China/Korea/Australia/Brazil,
[0062] and/or one or more ingredients in a cosmetic made by a top 100 (by market cap/sales) multinational cosmetic company/conglomerate,
[0063] and/or one or more ingredients in a cosmetic(s) made/marketed by one or more of Sederma SAS (France), Lipotec SA (Barcelona, Spain), L'Oréal, Unilever, Estée Lauder, Proctor and Gamble, Coty, Shiseido, Beiersdorf, Johnson & Johnson, Amore Pacific, Kao Corporation, Colgate-Palmolive, Chanel, Revlon, or similar,
[0064] and/or one or more ingredients in a commercially available cosmetic(s) that has one or more peptide ingredients,
[0065] and/or one or more ingredients listed in the International Nomenclature of Cosmetic Ingredients (INCI, INCI names are developed by the International Nomenclature Committee, INC) and/or included in the CTFA “International Cosmetic Ingredient Dictionary and Handbook” [wherein CTFA is “Cosmetic, Toiletry, and Fragrance Association, Inc.”, Washington, DC, USA],
[0066] and/or one or more ingredients listed in CosIng (the European Commission database for information on cosmetic substances and ingredients),
[0067] and/or one or more cosmetic ingrediants taught by one or more of: (i) “Harry's Cosmeticology” [e.g. its 9^{th} edition by Meyer R. Rosen (Editor)], Chemical Publishing Company, USA, (ii) Milady's “Standard Textbook of Cosmetology” (Delmar Learning), (iii) “Formulation Technology. Emulsions, Suspensions, Solid Forms” by Hans Mollet, Arnold Grubenmann and Helen Payne, published by John Wiley & Sons, (iv) “Chemistry and Technology of the Cosmetics and Toiletries Industry” by Clifford Williams Schmitt, Kluwer Academic Publishers, (v) Fiedler's “Encyclopedia of Excipients”, Cantor Verlag Aulendorf,
[0068] and/or one or more ingrediants listed in U.S. Pharmacopeia (USP)₂₅-NF20 (2002),
[0069] and/or one or more pharmaceutical/cosmetic ingredients/vehicles/carriers/additives/diluents/excipients/adjuvants/active agents (especially, but not restrictively, to those pertaining to treatment, health and/or care of the skin, including those increasing percutaneous absorption of peptides) listed in U.S. Pat. No. 8,946,166B2 (and/or in one or more of U.S. Pat. No. 9,067,967B2, U.S. Pat. No. 9,315,564B2, US2013/0078295A1, US2014/0322307A1, WO2014/170347A1, U.S. Pat. No. 6,372,717B1, U.S. Pat. No. 6,620,419B1, U.S. Pat. No. 6,974,799B2, U.S. Pat. No. 7,182,963B2, U.S. Pat. No. 7,998,493B2, U.S. Pat. No. 8,404,648B2, U.S. Ser. No. 10/660,839B2, U.S. Ser. No. 10/668,000B2, U.S. Ser. No. 10/668,000B2, US2004/0132667A1, US2018/0000717A1, WO2019149450A1, WO00/62743, U.S. Pat. No. 7,863,417B2, U.S. Pat. No. 7,671,009B2, and references therein),
[0070] and/or one or more ingredients commonly used in compositions for the treatment and/or care of the skin,
[0071] and/or one or more anti-aging/anti-wrinkle compounds/ingredients/agents: e.g., without limitation, botulinum toxin, epidermal growth factor, rapamycin, Vitamin A, one or more Retinoids {e.g., without limitation, retinol, retinal, tretinoin [all-trans-retinoic acid], isotretinoin [13-cis-retinoic acid], alitretinoin [9-cis-retinoic acid], etretinate, acitretin, adapalene, bexarotene, tazarotene, seletinoid G}, one or more retinoid complexes/salts/esters/ethers (e.g., without limitation, Retinyl palmitate), one or more Alpha Hydroxy Acids [AHAs], one or more Beta Hydroxy Acids [BHAs], Vitamin C, Vitamin E, Coenzyme Q10, one or more antioxidants, one or more peptides (e.g., without restriction, acetyl hexapeptide-3, acetyl hexapeptide-8, Matrixyl™ [palmitoyl pentapeptide-4], OS-01 peptide from company called OneSkin, heptapeptide-7, one or more defensins), one or more copper peptides e.g. copper peptide GHK-Cu, Matryxil, Nicotinamide adenine dinucleotide (NAD⁺), Nicotinamide mononucleotide [NMN], Nicotinamide riboside (NR), Nicotinamide (Nam), Nicotinic acid (NA), Nicotinic acid adenine dinucleotide (NaAD), Nicotinic acid mononucleotide (NaMN), platelet-rich plasma, rapamycin),
[0072] and/or one or more compounds/ingredients to treat/ameliorate/prevent/combat hair loss: e.g., without limitation, one or more 5a-Reductase inhibitors {5-ARIs, also known as dihydrotestosterone (DHT) blockers}, Finasteride, Dutasteride, Epristeride, Saw palmetto extract, Serenoa repens extract, Alfatradiol (also known as 17a-estradiol), one or more antiandrogens (e.g., without limitation, steroidal antiandrogens and non-steroidal antiandrogens), Bicalutamide, Bimatoprost, Cyproterone acetate, Flutamide, Ketoconazole, Latanoprost, Minoxidil, MK-434, Nepidermin, Nonsteroidal antiandrogen, RU-58841, Spironolactone, Steroidal antiandrogen, Topilutamide, Kopexil, Latanoprost, bimatoprost, Pinacidil, Diazoxide, one or more corticosteroids, IGF-1 (optionally in liposomes),
[0073] and/or one or more natural products (e.g. plant, marine, tissue) extracts,
[0074] and/or one or more of Acetone, Acetyl hexapeptide-3, Allantoin, Aloe, Alpha hydroxy acid, Aluminium zirconium tetrachlorohydrex gly, Argan oil, Azulene, Behentrimonium chloride, Bimatoprost, Bisabolol, Canthaxanthin, Carnauba wax, Castor oil, Ceteareth, Cetyl alcohol, Cocamide DEA, Cocamide MEA, Cocamidopropyl betaine, Cocamidopropyl hydroxysultaine, Cocoa butter, Conditioner, Copernicia Cerifera (Carnauba) Wax, Copper peptide GHK-Cu, Decamethylcyclopentasiloxane, Dihydroxyacetone, Dioxalin, Dipropylene glycol, Disodium cocoamphodiacetate, DMDM hydantoin, Erythrulose, Ethyl macadamiate, Ethylhexyl palmitate, Film-forming agent, Glycerol, Glyceryl behenate, Glycol distearate, Guaiazulene, Guanine, Hydrogenated jojoba oil, Hydrolyzed jojoba ester, Iodopropynyl butylcarbamate, Isoceteth-20, Isopropyl jojobate, Isopropyl myristate, Isopropyl palmitate, Jojoba alcohol, Jojoba ester, Jojoba oil, Jojoba Wax PEG-80 Esters, Jojoba Wax PEG-120 Esters, Lapyrium, Macadamia oil, Malic acid, Marula oil, Microbead, Microcrystalline wax, Mineral cosmetics, Mineral oil, Myristamine oxide, Oleyl alcohol, denatured alcohol, Palmitoyl pentapeptide-4, Panthenol, Paraben, PEG-10 sunflower glycerides, PEG-16 macadamia glycerides, PEG-80 Jojoba, PEG-120 Jojoba, PEG-150 hydrogenated jojoba, Petroleum jelly, Polyacrylic acid, Polydimethylsiloxane, Polyethylene glycol propylene glycol cocoates, Polyquaternium, Polyquaternium-7, Propylene glycol, Quaternium-15, Rice bran wax, Sculptra, Selenium disulfide, Silicone, Simmondsia Chinensis (Jojoba) Seed Oil, Simmondsia chinensis (jojoba) seed powder, Sodium laureth sulfate, Sodium lauroamphoacetate, Sodium lauroyl sarcosinate, Sodium myreth sulfate, Spermaceti, Stearalkonium chloride, Stearamidopropyl dimethylamine, Sunflower oil, Talc, 1-Tetradecanol, Tetramethyl acetyloctahydronaphthalenes, Tocopherol, 1-Tridecanol, Triethanolamine, Vitellaria, Zinc pyrithione, Zinc ricinoleate, Amiloxate, 4-Aminobenzoic acid, Avobenzone, Bemotrizinol, Benzophenone-n, Bisdisulizole disodium, Bisoctrizole, Cerium(IV) oxide, Cinoxate, Dibenzylideneacetone, Diethylamino hydroxybenzoyl hexyl benzoate, Dioxybenzone, Drometrizole trisiloxane, Ecamsule, Ensulizole, Enzacamene, Ethylhexyl triazone, Homosalate, Iscotrizinol, Menthyl anthranilate, Mexenone, Octocrylene, Octyl methoxycinnamate, Octyl salicylate, Oxybenzone, Padimate A, Padimate O, Polysilicone-15, Sulisobenzone, Titanium dioxide, Titanium dioxide nanoparticle, Trolamine salicylate, Umbelliferone, Zinc oxide, alkyl benzoate C12-C15, allantoin, water, ascorbyl palmitate, butane, Butyrospermum parkii, shea butter, cocoamide dea, dodecanol, egg oil, hydroxyethyl cellulose, hydroxypropyl cellulose, isobutane, isopentane, lauryl glucoside, Polysorbate 20, propane, sodium hydroxide, triethanolamine, honey, shea butter, almond oil, argan oil, rosehip oil, beeswax, stevia, glycerin, essential oil(s), benzyl alcohol, dehydroacetic acid, Glyceryl Caprilate, Potassium sorbate, Caprylhydroxamic Acid, Caprylyl Glycol, Glycerin, Xanthan Gum, EDTA, Emulsifying wax, Olive oil, Evening primrose oil, Tocopheyl Acetate, Cetearyl Alcohol, Caprylyl Glycol, Phenoxyethanol, Hexylene Glycol, Glycyrrhiza Glabra (Licorice) Root Extract, Sodium Hyaluronate, oleic pau mulato extract, pracaxi oil, allantoin, niacinamide, hyaluronic acid, andiroba oil,
[0075] and/or one or more compounds conferring one or more of the following activities: anti-aging, anti-wrinkle, rejuvenating, moisturizing/hydrating, revitalizing, conditioning, skin restructuring, skin relaxing, oily skin treatment, for reducing sebum production by sebocytes, exfoliating, anti-oxidant, free radical scavenging, pigment, colourant, skin whitening, skin tanning, anti-microbial, anti-bacterial, anti-fungal, anti-parasitic, antipsoriasis agents, anti-hair loss, hair growth induction, anti-cellulite, anti-stretch mark, anti-scar, anti-acne, anti-spot, anti-eczma, anti-dermatitis, perfume, anti-persperant, lubricant, anti-itch, anti-inflammatory, anti-histamine, DNA repair/protect, wound healing, epidermic hydrolytic enzyme, sun (UVA and/or UVB) protection;
[0076] optionally wherein the cosmetic is intended to be rubbed/poured/sprinkled/sprayed on/introduced into or otherwise applied to the human body;
[0077] for example (to illustrate, and NOT restrict) a skin and/or hair care product, shampoo, antidandruff shampoo, conditioner, a product delivered by micro-needling/dermaroller/plasma-needling/DermaPen, hair tonic, hair colour, hair dye, soap, soap substitute, shower gel, bath oil, bubble bath, toothpaste, mouthwash, moisturizer, emollient, face cream, eye cream, skin cream, skin/face/body/hair/moisturizing/anti-aging/anti-wrinkle/crow's-feet/masking/whitening/tanning/age spot/liver spot cream/oily cream/aqueous cream/lotion/powder/spray/aerosol/butter/gel/hydrogel/oil/salve/liquid/alcohol/emulsion/anhydrous-cream/stick/wax/ointment/foam/paste/solution/drop/gum/jelly/serum/scrub/mask/balm, stretch mark/cellulite/thigh cream/treatment, varicose vein cream, chapstick, lipstick, lip protector, lip gloss, lip liner, lip plumper, lip balm, lip stain, lip conditioner, lip primer, lip booster, lip butter, make-up, makeup, make-up foundation (such as fluid/compact foundation), rouge, make-up removal lotion/milk, under-eye concealer, under-eye cream, eye cream (for application around the eyes), eye shadow, mascara, mascara primer, eye shadow, eye liner, eyebrow pencil/cream/wax/gel/powder, foundation, concealer, bronzer, fake tan, complexion enhancer, rouge, blush, blusher, highlighter, setting spray, cleanser, skin cleanser, foaming wash, toner, eye mask, facial mask (non-limiting e.g. clay-based masks, e.g. using kaolin clay or fuller's earth, peel masks, sheet masks), exfoliant, perfume, cologne, aftershave, shaving foam, beard balm, fragrance, deodorant, antiperspirant, hairstyling product(s), hairspray, hair dye, nail polish, massage oil, barrier cream, sunscreen/sunblock/sun cream (e.g. offering protection against UVA and/or UVB radiation), spot/acne cream;
[0078] optionally wherein the cosmetic is for one or more of cleansing, beautifying, promoting attractiveness and/or altering the appearance of a subject (e.g., without restriction, making a more youthful/younger appearance, reducing the appearance of lines and wrinkles, preventing/reducing the sign(s) of aging/premature aging, making skin/hair look visibly younger).

[0079] Componentry to this disclosure is a compound of Formula (VII) or (VIII), e.g. at least one IF1 protein/fragment (e.g. from a human and/or another mammalian species, or sequence variant thereof), in liposomes (or lipid nanoparticles) in a fluid gel formulation (e.g., without limitation, as used in 1171 for (IGF)-1), optionally in use as a cosmetic, optionally wherein a more youthful/younger appearance is desired in a subject.

[0080] Both therapeutic and/or non-therapeutic use of a cosmetic of this disclosure is componentry to this disclosure.

[0081] Skin (e.g. Facial Skin) Administration, Including for Cosmetic Purpose(s)

[0082] A teaching/ingredient(s)/vehicle(s)/carrier(s)/additive(s)/diluent(s)/excipient(s)/adjuvant(s)/active agent(s) of a pharmaceutical/cosmetic composition (especially, but not restrictively, for skin administration) in U.S. Pat. No. 8,946,166B2 (and/or in one or more of U.S. Pat. No. 9,067,967B2, U.S. Pat. No. 9,315,564B2, US2013/0078295A1, US2014/0322307A1, WO2014/170347A1), but as applied to/implemented for/combined with a compound(s) of the present disclosure, is pharmaceutical/cosmetic composition of the present disclosure.

[0083] A compound(s), and/or cosmetic/pharmaceutical composition thereof, of this disclosure can be applied to the skin (e.g. facial skin) by iontophoresis, sonophoresis, electroporation, microelectric patch(es), mechanical pressure, osmotic pressure gradient, occlusive cure, microinjection(s), needle-free injection(s) by means of pressure, such as injection(s) by oxygen pressure, or any combination thereof.

[0084] At least one compound of this disclosure, and/or at least one cosmetic/pharmaceutical composition thereof, optionally for topical/transdermal application, can be produced in any solid, liquid or semi-solid formulation, for example, and not restricted to, one or more of (or combination thereof) cream, multiple emulsion (for example, and not restricted to, oil and/or silicone in water emulsion, water-in-oil and/or silicone emulsion, water/oil/water or water/silicone/water type emulsion, and oil/water/oil or silicone/water/silicone type emulsion), anhydrous composition, aqueous dispersion, oil, milk, balsam, foam, lotion, gel, cream gel, hydroalcoholic solution, hydroglycolic solution, hydrogel, liniment, sera, soap, shampoo, conditioner, serum, polysaccharide film, ointment, mousse, pomade, powder, bar, pencil, spray, aerosol (spray), including leave-on and rinse-off formulations. These topical/transdermal application formulations can be incorporated, using techniques known by a person of the art, into different make-up products such as one or more of make-up foundation (such as fluid foundations and compact foundations), make-up removal lotion, make-up removal milk, under-eye concealer, eye shadow, lipstick, lip protector, lip gloss and powder among others. These topical/transdermal application formulations can be incorporated, using techniques known by one of the art, into a fabric, non-woven fabric, medical device, which is in direct contact with the skin (optionally which can release active agent(s) by biodegradation of the binding system to the fabric, non-woven fabric or medical device, or by the friction between them and the body, and/or due to one or more of body moisture, the skin's pH, body temperature etc.), for example into different types of solid accessories for example, and not restricted to one or more of bandage, gauze, t-shirt, socks, tights, underwear, girdle, gloves, diaper, sanitary napkin, dressing, bedspread, wipes, adhesive patch, non-adhesive patch, occlusive patch, micro-electric patch or face mask.

[0085] In particular embodiments, at least one compound of/in this disclosure, optionally in a cosmetic/pharmaceutical composition, can be adsorbed on one or more of a solid organic polymer, solid mineral carrier such as, but not limited to, talc, bentonite, silica, starch or maltodextrin, among others.

### Eye Aging

[0086] F₁F₀ ATP hydrolysis inhibitor compound(s) of this disclosure slow aging but can reduce body temperature. A disclosure embodiment is to target an F₁F₀ ATP hydrolysis inhibitor compound(s) to one or both eyes of a subject, optionally by intravitreal injection(s) and/or eye drop(s) and/or contact lens coating/solution (optionally wherein the contact lens has little to no refractive ability or wherein the contact lens is prescriptive to the refractive defect/error of the subject's eye[s]) and/or some other drug administration route/device to the eye(s), known or findable to those of the art, wherein the eye(s) then has slower aging and lesser heat production, but wherein heat transfer from surrounding body areas (especially via blood flow) maintains eye(s) temperature at acceptable value. So, the temperature issue is mitigated and slower aging in the eye(s) endures. An embodiment is a method in which a subject takes or is administered an effective amount of a compound(s) of this disclosure, for example at least one compound of at least one of Formula (I), (II), (III), (IV), (V), (VII), (VIII), [X], and/or another compound that selectively inhibits F₁F₀ ATP hydrolysis, or a pharmaceutically-acceptable salt, solvate, hydrate or prodrug thereof, optionally by a local drug administration route to the eye(s) (e.g. by an eye delivery route known or findable to those of the art e.g. an eye(s) administration route used for an FDA/EMA licensed/sanctioned drug(s)/treatment(s) e.g. as described in the patent/scientific literature e.g. refer [18, 19, 20] and the papers they cite and the papers that cite them, e.g. refer U.S. Pat. No. 8,729,010B2 and references therein, which also teaches pharmaceutical compositions for eye delivery), to treat/ameliorate/prevent/combat eye(s) aging and/or an eye aging related disease/disorder, including any eye disease/disorder whose likelihood of onset increases with age and/or worsens with age, including, without limitation, age-related macular degeneration (AMD, early/intermediate/late), age-related wet macular degeneration, neovascular/wet AMD, dry AMD, Geographic atrophy (GA), wet and dry AMD in the same eye(s), Stargardt's macular degeneration, Best vitelliform macular dystrophy, diabetic retinopathy, proliferative diabetic retinopathy, diabetic macular edema, vision loss, progressive vision impairment, myopia (short-sightedness), degenerative myopia, hyperopia (far-sightedness), accommodative dysfunction, glaucoma, progressive glaucoma, cataract formation, retinal degeneration, progressive retinal degeneration, retinitis pigmentosa, leber hereditary optic neuropathy, Fuchs spot, Best's disease, Sorsby's fundus dystrophy. In an embodiment, one eye of the subject is treated and the other not (optionally administered drug vehicle control), optionally for a course of administrations over a period of time, and the anatomical/physiological/functional difference(s) between them is then compared after some period. Non-limiting example eye function tests are using the Snellen chart, or LogMAR chart, for visual acuity testing and/or the Amsler grid to investigate central vision. In an embodiment, a subject genetically predispositioned to age-associated eye disease(s)/disorder(s), e.g. macular degeneration, optionally discovered by genetic testing and/or family history analysis, is administered a compound(s) of this disclosure prophylactically. When a compound(s) of this disclosure is administered by intravitreal injection(s), optionally antibiotic(s) eye drop(s) (alternatively/in addition oral antibiotic(s)) is administered one or more times on the same day and/or in the same week and/or in the same month. Given increasingly aging societies in many countries, more and more people are succumbing to macular degeneration. It is noteworthy that there is presently no treatment on the market for dry AMD, which comprises 90% of macular degeneration cases, affecting millions globally. The projected number of people with age-related macular degeneration in 2020 is 196 million, increasing to 288 million in 2040 [21].

### Ear Aging

[0087] F₁F₀ ATP hydrolysis inhibitor compound(s) of this disclosure slow aging but can reduce body temperature. A disclosure embodiment is to target an F₁F₀ ATP hydrolysis inhibitor compound(s) to one or both ears of a subject, optionally by intratympanic and/or intracochlear administration and/or trans-oval window delivery and/or by ear drops and/or some other drug administration route/device to the ear(s), known or findable to those of the art, wherein the ear(s) then has slower aging and lesser heat production, but wherein heat transfer from surrounding body areas (especially via blood flow) maintains ear(s) temperature at acceptable value. So, the temperature issue is mitigated and slower aging in the ear(s) endures. A disclosure embodiment is a method in which a subject takes or is administered an effective amount of a compound(s) of this disclosure, for example at least one compound(s) of at least one of Formula (I), (II), (III), (IV), (V), (VII), (VIII), [X], and/or another compound(s) that selectively inhibits F₁F₀ ATP hydrolysis, and/or a pharmaceutically-acceptable salt, solvate, hydrate or prodrug thereof, optionally by a local drug administration route to the ear(s) (e.g. by an ear delivery route known or findable to those of the art e.g. an ear(s) administration route used for an FDA/EMA licensed/sanctioned drug(s)/treatment(s) e.g. as described in the patent/scientific literature e.g. refer 122, 231 and the papers they cite and the papers that cite them), to treat/ameliorate/prevent/combat ear(s) aging and/or an ear aging related disease/disorder, including any ear disease/disorder whose likelihood of onset increases with age and/or worsens with age, including, without limitation, age-related hearing loss, presbycusis, tinnitus.

Joint (e.g. Knee) Aging

[0088] F₁F₀ ATP hydrolysis inhibitor compound(s) of this disclosure slows aging but can reduce body temperature. A disclosure embodiment is to target/administer/apply an F₁F₀ ATP hydrolysis inhibitor compound(s) to one or more joints (optionally an osteoarthritic joint[s]) of a subject, e.g. one or both knees (optionally an osteoarthritic knee[s]), administered directly into the joint(s), optionally administered intra-articularly to the joint(s), optionally administered intra-articularly to an osteoarthritic joint(s), optionally administered topically/transdermally/intradermally to the (optionally osteoarthritc) joint(s)/knee(s) wherein the joint(s) then has slower aging and lesser heat production, but wherein heat transfer from surrounding body areas (especially via blood flow) maintains joint(s) temperature at acceptable value. So, the temperature issue is mitigated and slower aging in the joint(s) endures. An embodiment is a method in which a subject takes, or is administered, an effective amount of a compound(s) of this disclosure, for example at least one compound(s) of at least one of Formula (I), (II), (III), (IV), (V), (VII), (VIII), [X], and/or another compound(s) that selectively inhibits F₁F₀ ATP hydrolysis, and/or a pharmaceutically-acceptable salt, solvate, hydrate or prodrug thereof, optionally by local administration to a joint[s](e.g. injection into a joint[s], e.g. a joint[s] administration route used for an FDA/EMA licensed/sanctioned drug[s]/treatment[s], e.g. as described in the patent/scientific literature), to treat/ameliorate/prevent/combat joint(s) aging and/or a joint aging related disease/disorder/condition, including any joint disease/disorder/condition/pain whose likelihood of onset increases with age and/or worsens with age, including, without limitation, osteoarthritis. All joints are hereby contemplated, including, to illustrate and not restrict, knee(s) and/or elbow(s) and/or wrist(s) and/or shoulder(s) and/or ankle(s) and/or hip(s) and/or one or more joints of the hand(s) and/or foot/feet.

### Brain Aging

[0089] Neurodegenerative diseases have an aging component to their etiology [24] as their onset is a function of age (oxidative stress [24]). Indeed, all these diseases (prototypical examples include Parkinson's disease, dementia, Alzheimer's disease, amyotrophic lateral sclerosis {ALS}, Huntington's disease, Friedreich's ataxia, hereditary spastic paraplegia) can be thought of as the brain aging faster and dying before the rest of the body (adult brain mass decreases with age [25]). In our rapidly greying societies these diseases are a demographic time bomb. Indeed, beyond immeasurable personal suffering, they stand to decimate whole economies (healthcare spending becomes unsustainable percentage of GDP, already ˜30% in the USA). For example, nearly half of Americans, over 85, have dementia, which in time is an age that an increasing proportion of the population will surpass, it has no cure and can be completely debilitating, which strains families and communities [25]. Thus, any treatment that can slow brain aging, to make brain function last as long as the rest of the body, will greatly assist in matching “healthspan” to lifespan, which is arguably the Holy Grail in modern medicine.

[0090] A disclosure embodiment is a method in which a subject takes or is administered an effective amount of a compound(s) of this disclosure, for example at least one compound of at least one of Formula (I), (II), (III), (IV), (V), (VII), (VIII), [X], and/or another compound that selectively inhibits F₁F₀ ATP hydrolysis, and/or a pharmaceutically-acceptable salt, solvate, hydrate or prodrug thereof, to treat/ameliorate/prevent/combat brain aging and neurodegenerative disease(s). Optionally wherein the compound(s) is disproportionally delivered to the brain or central nervous system (CNS), or to specific brain/CNS area(s) or cell type(s), by administration route, strategy or targeting. Illustratively, not restrictively, brain targeting had been shown with exogenous dopamine [26-27]. Preferred brain structures/cells/neurons to target are those whose failure drives a neurodegenerative disease e.g. dopamine neurons in the pars compacta (in the substantia nigra). There are few of them, only 7,200 in rat [28], and in humans their number decline by aging at 5-10% per decade [29], which is a predisposing drive to Parkinson's disease (PD). A disclosure embodiment is a method in which a subject takes or is administered an effective amount of a compound(s) of this disclosure, for example at least one compound of at least one of Formula (I), (II), (III), (IV), (V), (VII), (VIII), [X], and/or another compound that selectively inhibits F₁F₀ ATP hydrolysis, or a pharmaceutically-acceptable salt, solvate, hydrate or prodrug thereof, to treat/ameliorate/prevent/combat Parkinson's disease, optionally wherein the compound(s) is disproportionally administered to dopamine neurons in the substantia nigra. If a compound of this disclosure decreases their heat generation, heat transfer from neighbouring brain and/or body regions will substitute this heat.

Lifespan and/or Healthspan Extension in a Subject by Administrating A Compound(S) of this Disclosure
Maximal Tolerated Dose (MTD) Study of a Compound(s) of this Disclosure

[0091] Three mice receive an initial dose of intravenous (i.v.) 10 mg/kg of drug. If these mice survive for 72 hours, the i.v. dose for the next cohort of three different mice is increased, whereas if one or more mice die, the i.v. dose for the next cohort of three different mice is decreased. And this schema is run iteratively. To illustrate, next dose level, 72 hours after prior dose level, can be determined by the following scheme:
[0092] 10 mg/kg, if no death, 30 mg/kg, if no death, 100 mg/kg
[0093] 10 mg/kg if no death, 30 mg/kg, if death, 17 mg/kg
[0094] 10 mg/kg, if death, 3 mg/kg, if death, 1 mg/kg,
[0095] 10 mg/kg, if death, 3 mg/kg, if no death, 5 mg/kg

[0096] But other schema can be developed by one of the art, involving different doses and/or a greater number of doses and/or using a different route of administration e.g. oral (PO), intraperitoneal (IP), intravenous (IV), subcutaneous (SC), intramuscular (IM) or other. At each dose level, animals are observed for the presence of acute toxic symptoms (mortality, convulsions, tremors, muscle relaxation, sedation, etc.) and autonomic effects (diarrhea, salivation, lacrimation, vasodilation, piloerection, etc.) during the first 60 minutes, again at 2, 24, 48 and 72 hours. Body weights are recorded pre-dose and at 72 hours after dose.

[0097] An alternative MTD determination method that better conserves compound and minimizes the number of animals sacrificed: a single mouse is given a dose (IP, IV, SC, IM or PO) of 400 mg/kg, a second mouse receives a dose of 200 mg/kg and a third mouse receives a dose of 100 mg/kg. The mice are observed for a period of 2 weeks. They are sacrificed if they lose more than 20% of their body weight or if there are other signs of significant toxicity. If all 3 mice must be sacrificed or die, the next 3 dose levels (e.g. 50, 35 and 12.5 mg/kg) are tested in a similar manner, whereas if only one or two dies, or needs to be sacrificed, the next 3 dose levels are between the highest shown safe dose thus far and the lowest lethal/toxic dose shown thus far. This process is repeated until a maximal tolerated dose (MTD) is found.

[0098] A compound of this disclosure, a compound that preferentially inhibits F₁F₀ ATP hydrolysis over F₁F₀ ATP synthesis, for example at least one compound of at least one of Formula (I), (II), (III), (IV), (V), (VII), (VIII), [X], or a pharmaceutically-acceptable salt, solvate, hydrate or prodrug thereof has the peculiarity that its MTD is higher if the animal is housed at 37° C. instead of normal room temperature (˜22° C.). The MTD and/or LD₅₀ and/or LD₃₀ and/or LD₁₀ and/or No-Observed-Adverse-Effect Level (NOAEL) of a compound(s) of this disclosure, optionally compound 7b, is investigated and recorded at both temperatures, optionally at interim temperature(s) also. This information is then useful for implementing other example embodiment(s) of this disclosure. The MTD (or other drug dose safety measure) to use, the value to use and apply in designing a study, depends on what temperature(s) the animal(s) is to be housed at in the study. This different MTD at different temperature aspect to a compound(s) of this disclosure is more pronounced the smaller the animal e.g. more pronounced/important for mice than rats.

Lifespan Extension Using a Compound(s) of this Disclosure

[0099] An example embodiment of this disclosure is to use a compound(s) of this disclosure, a compound that preferentially inhibits F₁F₀ ATP hydrolysis over F₁F₀ ATP synthesis, for example at least one compound of at least one of Formula (I), (II), (III), (IV), (V), (VII), (VIII), [X], or a pharmaceutically-acceptable salt, solvate, hydrate or prodrug thereof in an animal (e.g. mouse) lifespan study. Illustratively, compound 7b is used in a mouse lifespan study. For non-restrictive example, 300 six-week old female Mus Musculus C57BL/6 strain mice are sourced from a commercial vendor (e.g. Charles River Laboratories Inc., MA, USA). Alternatively more mice can be used to be able to statistically detect smaller percentage increases in lifespan. In an alternative embodiment male mice are used also, wherein a study with both sexes valuably permits gender difference(s) to be identified. However, males bring the additional complexity of fighting, which can lead to mice deaths (need more males than females because some males will be invariably lost to fighting). In other example embodiments another mouse strain(s) is used and/or genetically heterogeneous mice, which avoids genotype-specific effects on disease susceptibility. The mice are housed at 37° C., which is safe for mice (refer [30]), by setting the room/ambient temperature accordingly e.g. by placing their cage(s) (3-5 mice per cage) in a Plant-Growth/Veterinary or Animal Intensive Care (ICU) incubator(s) set at this temperature, wherein such incubators can be sourced from one or more of Precision Refrigerated Plant-Growth Incubators, Thermo Fisher Scientific, Darwin Chambers Inc., Powers Scientific Inc, Brinsea Products Ltd., Lyon Technologies Inc., or similar company, wherein some of these companies even make custom incubator designs. The electrical cost of this temperature maintenance is reduced by running the study in a hot geographical location/country, Singapore. Mice are kept on a 12 hour light/dark cycle, in 40-70% humidity, with corn cob bedding and have ad libitum sterilized/irradiated chow (illustratively AlN-93G standard diet or Purina 5LG6 or Purina 5001) and water. Preferably the mice are housed in a pathogen-free barrier environment (SPF conditions). One of the art knows how to successfully look after laboratory mice and there are well known guidelines and guides publically available. Mice are randomly allocated into two groups: 100 mice are in the drug treatment group, 200 mice are in the non-drug control group (twice more mice in control than drug group). Optionally a positive control (100 mice, no drug administered, calorie restricted diet) group is added. In some example embodiments the test drug is administered to the mice through drinking water/solution (in which case fluid intake of drug treatment and control groups is recorded). Indeed, there are compounds of this disclosure that are orally bioavailable e.g. 6b is 47% orally bioavailable in rats when administered in polyethyleneglycol:water:ethanol (1:1:1) solution [8]. Administering 6b as a salt, e.g. 6b HCl, increases its solubility, which is advantageous for oral administration via drinking solution. Alternatively, the drug (base and/or salt) is mixed in with previously irradiated (sterilized) chow, wherein the drug is 0.0001%, or 0.001%, or 0.01%, or 0.05% (recommended starting percentage for experimentation to find optimal percentage), or 1%, or 2%, or 3% or another percentage of chow weight, which is done by BioServ (Flemington, NJ, USA) or TestDiet Inc. (TestDiet, Richmond, IN, USA) or Dyets Inc. (Bethlehem, PA, USA) or a similar company/service, the drug content of chow is checked using HPLC, wherein this chow is produced every 2 months during the length of the study, and is (alongside untreated chow) stored refrigerated, is never permitted to exceed 40° C. and is kept away from light whenever possible to ensure drug stability (the light/dark cycle in the mouse facility is not altered). Preferably, water and chow are warmed to 37° C. before being accessible to the mice. To calculate how many mg/kg of drug any given mg/kg of drug in chow will deliver, a 30 g mouse consumes ˜5 g food/day [31] (⅙ of body weight, which is an approximate relation that can be applied to younger and lighter mice also), so illustratively, to deliver 40 mg/kg of drug to mice per day requires drug to constitute 240 mg/kg (0.024%) of chow. Optionally, further mice can be sourced for multiple drug treatment groups, all with the same number (100) of mice, which differ in the percentage weight of chow that is the test drug. So, that mice of the different drug treatment groups are administered a different drug dosage. Optionally, the test drug is microencapsulated e.g. by Southwest Research Institute (San Antonio, Texas) using a spinning disk atomization coating process with the enteric coating material Eudragit S100 (Rohm Pharma). This thermoplastic coating material increases the drug fraction that survives the chow preparation process. Because the coating material is water soluble only in non-acidic conditions, the encapsulated drug is released in the small intestine rather than in the stomach. It is prudent to verify that the compound retains activity after incorporation into mouse chow and that therapeutic blood levels of the drug can be achieved (blood drawn from tail vein). Method(s) to record the amount of a drug in blood is well known to those of the art e.g. using HPLC with ultraviolet detection [32] and/or LC-MS and/or LC-MS/MS. If eating the chow kills the mice, iteratively reduce the drug content of the chow until the mice can safely survive eating the chow. To observe if there is sufficient drug in chow to cause a physiological effect, house the mice at 22° C. and record the rectal temperature of the mice every 15 minutes and observe if their body temperature falls. If so, there is a working drug concentration in the chow. Optionally, increase the drug content of chow until the body temperature drop is sufficient to kill the mice in this 22° C. study. Then check that this drug content of chow doesn't kill the mice when they are housed at 37° C., if not, proceed with the study, if so, reduce the dose until finding the largest safe drug dose in chow at 37° C. Either use this largest safe dose or some fractional function (e.g. half e.g. 10% e.g. another percentage) of it. The recommended oral starting dose of 6b is 80 mg/kg≈0.05% weight of chow, wherein this recommendation is extended to compound 7b also. However, in other embodiments a different chow drug percentage is used and one of the art will be able to experiment with different chow drug percentages to explore the best positioning/compromise between drug safety and maximal drug effect, wherein preferably a Maximal Tolerated Dose (MTD) study, as described elsewhere herein, would have been performed prior to give further information to guide this assessment. Methods to derive a drug dose to be used in a drug trial, if the drug's MTD/LD₅₀ (drug dose that kills 50%)/LD₁₀ (drug dose that kills 10%) is known, are well known in the art. In an embodiment, the No-Observed-Adverse-Effect Level (NOAEL) is found and used, or some selected fraction (e.g. 50%, 10% or other) of it, wherein most optimally the NOAEL is found for the route (e.g. oral) and method (e.g. chow) of drug administration used in the lifespan study. MTD studies are typically single dose studies whereas this will be a long term study with the drug being administered frequently over a long period and this distinction needs to be considered. Pilot studies with small numbers of mice can be very instructive for setting the parameters of larger studies with many mice. In an alternative embodiment the drug is (e.g. daily) administered intravenously (e.g. at tail vein) through a catheter wherein control mice also have a catheter fitted and are administered vehicle at the same frequency as test mice are administered [drug+vehicle]. In other embodiments the drug is administered by some other route/method of administration. Food intake (important to record because calorie restriction extends life [33], so any difference in food intake between the drug treatment and control groups needs to be known; food intake of drug treated mice will be less than control mice because the drug renders their metabolism more efficient requiring less food and so they will choose to eat less food) and body weight are measured on a biweekly or bimonthly basis for the duration of the study. Healthspan assays (e.g. as set out in [34, 35, 36] and/or assaying homeostatic capacity and/or observing heart rate variability and/or rotarod assay(s) and/or grip assay and/or horizontal bar assay and/or GSSG/GSH ratio and/or NAD/NADH ratio determination and/or one or more of the healthspan/functional assays listed in another example embodiment of this disclosure and/or another assay of the art e.g. recording one or more of body coordination, memory, learning, movement, cognitive function) can be performed at regular intervals, especially as the mice get older. During the study, the day that each mouse dies is recorded and the study ends when all mice have died. Survival curves are plotted using the Kaplan-Meier method, which includes all available animals at each time point. Statistical analyses is performed using JMP IN (SAS, Cary, NC). The criteria for euthanasia is based on an independent assessment by a veterinarian, according to AAALAC guidelines and only cases, where the condition of the animal is considered incompatible with continued survival, are represented in the curves. Every animal found dead or euthanized is necropsied for pathology score. At study end, the mean, median and maximal lifespan is calculated separately for drug treated and control groups. Comparing the proportion of mice still alive in each group at each age when the pooled population reaches the 90% mortality point is also a useful measure. The data will show that 7b extends the lifespan of mice, especially if they are maintained at 37° C. This temperature dependence aspect can be shown by running the experiment again, or in parallel, wherein all the mice (drug treated and control) are kept at 22° C. rather than 37° C., wherein there is a lower drug dose(s) with the drug treated group(s) at this lower ambient temperature (because the tolerated drug dose is lower at lower ambient temperature), and wherein, with lower drug dose, the lifespan extension isn't as great. In an alternative embodiment, when mice are first sourced they are older e.g. older (e.g. old) mice are sourced from the National Institute on Aging Aged Rodent Colony or from the Jackson Laboratory (USA, has 19.5 months old mice available, roughly equivalent to a 50 year old human). This means that the experiment will take less time to run, because the mice will die sooner after being received. But the increase in lifespan observed will be less. Another way to shorten the duration of the study is to use mice that undergo accelerated aging [37, 38, 39, 40]e.g., without limitation, Senescence Accelerated Mouse-Prone 8 (SAMP8) mice (approximately half the lifespan of normal laboratory mice; commercially available from Harlan Laboratories, Bicester, UK; also available from the Society for Senescence-Accelerated Mouse (SAM) Research, Japan [http://www.samrc.jp], as are further senescence accelerated mouse strains) and/or BubR1^{H/H} progeroid mice [41] and/or XPD (e.g. XPD^{TTD} [42]) mutant mice (optionally carrying an additional mutation(s) in XPA and/or XPC) [43, 44](mice with a Trichothiodystrophy [TID] mutation in XPD, with XPC knocked out, have accelerated aging and only live 4-8 weeks) and/or XPC mutant mice [45.46](commercially available from The Jackson Laboratory, Stock No: 010563) and/or ERCC1 mutant mice (e.g. ERCC1^{-/-} [47]e.g. ERCC1^{Δ/-} mice carry a null mutation in one allele and a 7-amino acid truncation in the second allele, maximum lifespan is ˜6 months) 148, 49, 371 and/or Ku70 and/or Ku80 and/or Ku86 [50] and/or DNA-PK_{CS} mutant mice [51] and/or Caspase-2 mutant mice (commercially available from The Jackson Laboratory, Stock No: 007899) [52, 53] and/or ICE mice (Induced Changes in Epigenome) and/or some other accelerated aging mouse model of the art. Some of these accelerated aging mouse models, as are others not mentioned but that can be found by one of the art, are recognised models of human accelerated aging diseases. Alternatively, to shorten the study duration, one can use a smaller and shorter lived mammal species than mice (20 g) e.g. the Common Shrew (9 g) or the even smaller Etruscan shrew (1.8 g). An embodiment of this disclosure is to enter a compound(s) of this disclosure into the Major Mouse Testing Program (MMTP) and/or the National Institute on Aging's Interventions Testing Program (ITP) and/or use the same/similar/inspired testing protocol for a lifespan study using a compound(s) of this disclosure, or another lifespan study protocol in the literature or a lifespan study protocol conceived by someone of the art, optionally after their reading lifespan studies in the literature e.g., without limitation, [32, 54, 55, 56, 57, 58, 59]. A disclosure embodiment is to enter a compound(s) of this disclosure, or result(s) from using a compound(s) of this disclosure, into a mouse/rodent or other animal lifespan competition such as the Methuselah Mouse Prize (MPrize) and/or Palo Alto Longevity Prize and/or other/similar. A compound(s) of this disclosure extends lifespan by a direct anti-aging effect and also by an anti-cancer effect, reducing the incidence of, and by treating/ameliorating/preventing/combating cancer. Given the established link between age/aging and neurodegenerative disease, a compound of this disclosure, which slows aging as shown by this example, has utility as a therapeutic for neurodegenerative disease e.g. (without restriction) for Alzheimer's disease and/or dementia. Illustratively, Rapamycin extends mouse lifespan [32, 57] and exerts therapy in a mouse model of Alzheimer's disease 1601. An accelerated mouse model of aging, SAMP8, is concurrently a mouse model of Alzheimer's disease [61].

[0100] Instead of, or in addition to, using mouse death as an endpoint in this study, an aging/mortality biomarker(s) can be used, e.g. one or more listed in the database: http://mortalitypredictors.org/ [62] e.g. walking speed e.g. epigenetic/methylation/Horvath's clock. In this way, compound(s) effect on aging/mortality can be assayed before death. This is especially important for human studies with a compound(s) of this disclosure, or a pharmaceutically-acceptable salt, solvate, hydrate or prodrug thereof, optionally following on from mouse studies, given that humans have a long lifespan and so a surrogate endpoint (change in a biomarker(s) e.g. walking speed) to assess the change in aging/mortality is preferable to awaiting lifespan data.

Healthspan Assays Show that a Compound(s) of this Disclosure Slows Aging, Including Brain Aging, and Treats/Ameliorates/Prevents/Combats Neurodegenerative Disease(s), Including Alzheimer's Disease

[0101] APP/swePS1ΔE9 mice is a mouse model of Alzheimer's disease [63], available from The Jackson Laboratory (stock no: 004462). Senescence Accelerated Mouse-Prone 8 (SAMP8) mice display a phenotype of accelerated aging, with associated cognitive decline, and is a mouse model of aging driving Alzheimer's disease and/or dementia [61], available from Harlan Laboratories (Bicester, UK). In a disclosure embodiment APP/swePS1ΔE9 mice (or an alternative Alzheimer's disease mouse model {to illustrate and not restrict: from the Model-AD project and/or The Jackson Laboratory have a number of different Alzheimer's disease mouse models available [typically present learning deficit, from variable age, many including spatial learning deficit], or the PDAPP (also known as hAPP(J20) transgenic mouse model of Alzheimer's disease [60]}, or a mouse model of a different neurodegenerative disease e.g. a mouse model of Parkinson's disease, optionally sourced from The Jackson Laboratory) are used for the following study. In a different disclosure embodiment SAMP8 mice (or an alternative accelerated aging mouse model) are used in the following study. In a different disclosure embodiment normal mice are used in the following study. This study will now be described with SAMP8 mice. At all places that SAMP8 is referred to, in another embodiment, “APP/swePS1ΔE9” is substituted in its place. At all places that SAMP8 is referred to, in a further embodiment, “normal” is substituted in its place. Six-week old male SAMP8 mice are sourced and randomly assigned to the following groups: 200 SAMP8 mice are maintained on control chow (LabDiet 5015, TestDiet, Richmond, IN) and 100 SAMP8 mice are maintained on chow (LabDiet 5015) that contains a compound(s) of this disclosure: a compound that preferentially inhibits F₁F₀ ATP hydrolysis over F₁F₀ ATP synthesis, for example at least one compound of at least one of Formula (I), (II), (III), (IV), (V), (VII), (VIII), [X], or a pharmaceutically-acceptable salt, solvate, hydrate or prodrug thereof. Illustratively, compound 7b of this disclosure. How to prepare such chow has been disclosed for an earlier disclosure example. Food consumption and body weight are monitored during the study. In a further example embodiment there is more than one drug treated group, wherein these groups differ in drug dose given. Preferably all mice are housed at 37° C., as described for a prior disclosure example, and preferably the behavioural experiments are performed at 37° C. also, wherein preferably water in the water tests is also at 37° C. Mouse body weights are measured regularly. Behavioural tests are conducted every month. The study ends when all mice die. As the mice get older, drug treated SAMP8 mice start to outperform control SAMP8 mice in one or more of these tests, and/or a test variant(s), and/or a similar test(s), and/or another test(s) of mental/cognitive faculty(s) e.g. as found in the literature or as modified by someone of the art upon reading the literature: for the following test(s) the experimenter is blinded to which mice are drug treated and non-drug treated, preferably all tests are videotaped for parallel independent confirmatory analysis by another experimenter(s), wherein automatic computer software analysis is used where available/possible to aid analysis:

[0102] (1) Activity. The open field test is performed using MED Associates hardware and Activity Monitor software according to manufacturer's protocol (MED Associates Inc, St. Albans, VT, USA). Animals are individually placed into clear Plexiglas boxes (40.6×40.6×38.1 cm) surrounded by multiple bands of photo beams and optical sensors that measure horizontal and vertical activity. Mouse movement is detected and recorded for 30 minutes by breaks within the beam matrices. Old (e.g. 10 months) drug treated SAMP8 mice have a higher average velocity of movement, moving greater distance and a greater number of vertical movements than equally old SAMP8 control mice.

[0103] (2) Prudence. Elevated Plus maze. Young healthy mice have an aversion to open spaces. Mental decline is associated with dis-inhibition and greater comfort/time spent in open spaces. The elevated plus maze consists of four arms (two open without walls and two enclosed by 15.25 cm high walls) 30 cm long and 5 cm wide in the shape of a plus. A video camera mounted overhead on the ceiling linked to video tracking software (Noldus Etho Vision) is used to collect behavioural data. This software detects and records when mice enter the open or closed arms of the maze and the time spent in each. Mice are habituated to the maze for 1 minute before testing by placing them in the centre of the maze and blocking their entry to the arms. Dis-inhibition is measured by comparing time spent on open arms to time spent on closed arms over a 5 minute testing period. Old (e.g. 10 months) drug treated SAMP8 mice have less dis-inhibition than equally old control SAMP8 mice.

[0104] (3) Memory, object recognition. Young healthy mice spend more time exploring a novel object than a familiar one. Mice are tested in a standard home cage. Phase 1 (Habituation): Each mouse is placed into the apparatus (no objects present) for two 10 minute sessions separated by 1-4 hours to habituate to the testing environment. Phase 2 (Training): Two identical velcro-backed objects (object “A”) are attached into designated corners of the apparatus. The mouse is placed into the apparatus opposite to the objects and recorded by a camera for 10 minutes. Phase 3 (Test): One hour after training, the test phase begins. Only one of the objects is replaced with a new object (object “B”). The mouse is placed into the apparatus opposite to the objects and recorded for 5 minutes. The apparatus is wiped and objects cleaned with 70% alcohol to remove odours between mice. “Object recognition index” is calculated by dividing the amount of time spent with (touching with nose or nose pointing at object and within 0.5 cm of object) object B by the total time spent with objects A +B and multiplied by 100. Old (e.g. 10 months) drug treated SAMP8 mice have a greater recognition index than equally old control SAMP8 mice.

[0105] (4) Memory, learning, re-learning. Barnes maze: The maze consists of a flat circular surface (36″ diameter) with 20 equally spaced holes (2″ diameter) along the outer edge. One of the holes leads to a dark hide box while the other 19 lead to boxes that are too small to be entered. The latency to enter the hide box is recorded. The test is conducted in three phases. Phase 1 (Training): A hide box is placed under one of the holes. Animals are placed into an opaque cylinder in the centre of the maze for 30 seconds to promote spatial disorientation at the start of the test. After 30 seconds, the cylinder is removed and the animal explores the maze until it finds and enters the hide box. The number of incorrect entries (nose pokes and head deflections over any hole that did not have the hide box beneath it) is scored. If the mouse fails to enter the box within 3 minutes, it is gently led into the box. The animal then remains in the box for an additional 20 seconds before it is removed from the box and gently placed into the home cage. Training is repeated three times a day for four days. The location of the hide box remains the same during every trial but it is shifted between subjects to reduce the potential for unintended intra-maze cues. Phase 2 (Retention): This phase measures retention of spatial memory following a delay. After a two day break from training, each animal is re-tested for a one day, three-trial session using the same hide box location as before. Phase 3 (Reversal): This phase examines memory reversal. On the day following the retention phase, a new hide box location is established 180 degrees from the original location. The same method as before is used and trials are repeated three times a day over two consecutive days. Old (e.g. 10 months) drug treated SAMP8 mice find the hide box faster, better retain knowledge of where the hide box is and learn faster a new location of the hide box than equally old control SAMP8 mice.

[0106] (5) Spatial navigational memory. Two-day water maze. Mouse tracking is performed using SMART version 2.0 (Panlab). The water is painted milk-white with nontoxic paint. A platform which is visible during training on Day 1 is then submerged just under the water level during testing on Day 2 and mice use spatial cues on the wall around the pool to navigate to the platform during testing. During testing on Day 2, the time it takes each mouse to find the hidden platform is measured. Old (e.g. 10 months) drug treated SAMP8 mice find the hidden platform faster than equally old control SAMP8 mice.

[0107] (6) Morris Water Maze 1641. Mouse tracking is performed using SMART version 2.0 (Panlab). The water is painted milk-white with nontoxic paint. 4 trials per day for 5 consecutive days. For each trial, mice are placed in the pool at 1 of 4 start locations. The starting locations are separated by 90° and are termed south, west, north, and east. Mice start a trial once from each of the 4 possible start locations on each day. The goal platform is positioned 45 cm from the outside wall in the south quadrant of the maze for all groups. The latency to find and mount the hidden platform is measured. Swimming speeds are also recorded to assess drug-induced motor effects. If the mice fail to find the platform before 120 seconds expires, they are placed on the platform by the experimenter. Mean daily latency to find the goal platform is calculated for each mouse. On day 6, the platform is removed and time spent in the platform quadrant determined. The water tank is surrounded by opaque dark panels with geometric designs at approximately 30 cm from the edge of the pool, to serve as distal cues. Old (e.g. 10 months) drug treated SAMP8 mice swim faster and reach the hidden platform faster, and spend longer in the platform quadrant when it is removed, than equally old control SAMP8 mice.

[0108] (7) Fear conditioning, fear memory, associative learning. A mouse freezes if it remembers and associates that environment with an aversive stimulus. Mice are trained on Day 1 to associate their environment with an aversive stimulus (a foot shock). The amount of time spent freezing in response to the environment is measured on Day 2. Fear conditioning is performed in a conditioning chamber (Med Associates) equipped with a grid floor via which the foot shock can be administered. Each mouse is placed inside the conditioning chamber for 180 seconds. A foot shock (2 seconds, 0.4 mA) is delivered 148 seconds after placement in the chamber. Twenty-four hours later, context-dependent freezing is measured during 3 minutes. Time spent freezing is measured using Any-Maze™ software. To avoid any influence of foot shock exposure on further testing, this is the last test performed of the battery of tests and all other tests are carried out in tests rooms other than the fear conditioning test. Old (e.g. 10 months) drug treated SAMP8 mice spend more time freezing in response to the context associated with the aversive stimulus than equally old control SAMP8 mice.

[0109] (8) As measured by an assay(s) described in [65], old (10+ months) drug treated SAMP8 mice have less hearing and/or vision loss (have a lower hearing threshold and/or a greater visual contrast sensitivity) than old (10 months) control SAMP8 mice.

[0110] (9) As measured by an assay(s) described in [66], old (10+ months) drug treated SAMP8 mice have greater neuronal plasticity (e.g. greater hippocampal synaptic plasticity e.g. greater Long-Term Potentiation [LTP] with excitatory neurons), and less neuronal degeneration and reactive astrocytosis, than old (10 months) control SAMP8 mice.

[0111] (10) Social preference test (SPT). Assesses sociability and social novelty preference (i.e. social recognition memory). The apparatus consists of 3 chambers, a central chamber (length: 9 cm, width: 18 cm, depth: 20 cm) and two outer chambers (6 cm*18 cm*20 cm). The dividing walls are made of clear Plexiglas, with square passages, 4 cm high and 4 cm wide. One circular cage (i.e. mouse enclosure) is placed into each outer chamber. The mouse enclosures are 15 cm in height with a diameter of 7 cm and bars spaced 0.5 cm apart to allow nose contact between mice but prevent fighting. The chambers and enclosures are cleaned with 30% ethanol in-between trials (inter-trial interval of 5 minutes) and fresh corn cob bedding is added prior to each test trial. Test animals are isolated for an hour prior to the start of testing. During the habituation trial, two mice are placed individually in the central chamber and allowed to freely explore the apparatus and the two empty enclosures for 5 minutes. For the sociability test an unfamiliar adult male mouse is placed in one of the two enclosures (i.e. opponent chamber) in a quasi-randomised fashion. Then the test mouse is returned to the apparatus and allowed to explore all three chambers for 10 minutes. Finally, test animals are observed in a 10 minute social recognition test. For this, a second, unfamiliar mouse is placed in the previously empty chamber so that the test mouse has the choice to explore either the familiar mouse (from the previous trial) or the novel, unfamiliar mouse. AnyMaze™ tracking software is used to determine the time spent in the different chambers, number of entries and distance travelled by the test mice in each trial. Time spent sniffing the opponent is recorded manually (i.e. snout of test mouse within the enclosure containing the opponent mouse or <5 mm away from enclosure). Old (e.g. 10 months) drug treated SAMP8 mice spend more time with the novel individual, as compared to time spent with the familiar individual, than equally old control SAMP8 mice.

[0112] (11) Olfactory test (i.e. cookie test). Test mice are familiarised with a high carbohydrate food (Froot Loops: Kellogg Pty. Ltd., Strawberry Hills, Australia) in their home cages, 24 hours prior to the test. Consumption is observed by the experimenter to ensure the novel food is palatable for the mice. On test day, test mice are habituated for 5 minutes to a large opaque cage (47 cm*18 cm*13 cm) containing 2 cm deep bedding. The animal is removed from the cage thereafter, and one Froot Loop is buried randomly in the cage bedding. The animal is then returned to the cage and given 10 minutes to locate the buried food. The latency to find the Froot Loop is recorded. Old (e.g. 10 months) drug treated SAMP8 mice will find the Froot Loop faster than equally old control SAMP8 mice.

[0113] (12) In treadmill testing, old (e.g. 10 months) drug treated SAMP8 mice have a faster maximal running speed, and greater running endurance, than equally old control SAMP8 mice, whether trained or untrained at treadmill running.

[0114] (13) Old (e.g. 10 months) drug treated SAMP8 mice have one or more of better Blood Brain Barrier (BBB) homeostasis, less inflammation (e.g. in the brain), less gliosis, better vascular function (e.g. in the brain), less Amyloid beta (AP), less tau protein (and/or less hyperphosphorylation of tau protein), lower levels of Vascular Cell Adhesion Molecule 1 (VCAM-1, a protein associated with vascular endothelium inflammation), lower levels of endogenous immunoglobulin G (IgG, high levels observed in old mice as consequence of disrupted BBB permeability), less glial fibrillary acidic protein (GFAP) expression, increased brain Docosahexaenoic Acid [DHA](possibly because of less oxidation of DHA, DHA is the primary structural fatty acid in the human brain and has been linked to cognitive performance. Low plasma levels of DHA are associated with cognitive decline in elderly and Alzheimer's disease patients, higher DHA intake and plasma levels inversely correlate with Alzheimer's disease risk, DHA supplementation in aged animals enhances learning and memory [67]), increased brain glutamate levels (brain [glutamate] decrease with age [68] and low [glutamate] has been observed with Alzheimer's disease [69, 70]) and/or a lesser pro-oxidant status in the brain than equally old control SAMP8 mice. (14) Old (e.g. 10 months) drug treated SAMP8 mice have less aging (are more similar to young SAMP8 mice), at one or more of the cognitive/movement/anatomical/physiological/electrophysiological/cellular (e.g. number of senescent cells [71])/biochemical/neurochemical/protein/protein modification (e.g. carbamylation 1721)/oxidation e.g. [73, 74]/metabolite/metabolic/epigenetic/histone loss/histone modification/telomere length/gene expression/DNA/DNA modification (e.g. DNA methylation)/RNA levels, than equally old control SAMP8 mice, for example as reported using one or more of the assays described in [75, 76, 77, 78, 79, 80, 81, 82, 83] or some other aging assay(s) of the art e.g. as described in the literature e.g. using/leveraging an aging/mortality biomarker(s) reported in the database: http://mortalitypredictors.org/ [62].

[0115] (15) Transcriptional drift is an age-associated loss of coordination among groups of genes 184, 851. Aging causes genes within functional groups to change expression in opposing directions, which cause a transcriptome-wide loss in mRNA stoichiometry and loss of co-expression patterns in aging animals, as compared to young animals. Observing hippocampal gene expression data, old (e.g. 10 months) drug treated SAMP8 mice have less transcriptional drift than equally old control SAMP8 mice i.e. old (e.g. 10 months) drug treated SAMP8 mice have a transcriptome (e.g. hippocampal transcriptome) more similar to young SAMP8 mice than equally old control SAMP8 mice. Metabolomic/metabolic drift is an age-associated change in the relative/absolute amounts of metabolite(s) e.g. reduced [NAD*][146, 138], increased AMP/ATP etc. [87]. Old (e.g. 10 months) drug treated SAMP8 mice have a (e.g. plasma and/or brain [e.g. hippocampal]) metabolome more similar to young SAMP8 mice than equally old control SAMP8 mice i.e. old (e.g. 10 months) drug treated SAMP8 mice have less (e.g. plasma and/or brain [e.g. hippocampal]) metabolomic/metabolic drift than equally old control SAMP8 mice. Optionally metabolome analysis is performed using Precision Metabolomics™ (Metabolon Inc., Morrisville, NC, USA).

### Hypermetabolism

[0116] A disclosure embodiment is a method in which a subject takes or is administered an effective amount of a compound(s) of this disclosure, for example at least one compound of at least one of Formula (I), (II), (III), (IV), (V), (VII), (VIII), [X], and/or another compound that selectively inhibits F₁F₀ ATP hydrolysis, or a pharmaceutically-acceptable salt, solvate, hydrate or prodrug thereof, optionally in co-therapy with one or more of an anti-thyroid drug(s) (illustrating, without restriction, carbimazole, methimazole, propylthiouracil/PTU, potassium perchlorate), radioiodine, beta blocker(s) (illustrating, without restriction, propranolol, metoprolol), surgery (thyroidectomy), to treat/ameliorate/prevent/combat one or more of hypermetabolism, heat intolerance, thyroidal hypermetabolism, non-thyroidal hypermetabolism e.g. Luft's disease.

Compounds of this Disclosure are Anxiolytics, Hypotensives,

### Anticonvulsants, Antipsychotics, Antidepressants, Antiemetics, Analgesics/Painkillers, Sedatives, Tranquilizers, Hypnotics and Antihistamines

[0117] When mice were administered Compound 6b (its structure is in FIG. 2) they exhibited hypoactivity, the duration of which correlated with their drop in rectal temperature, which correlated with the administered dosage of 6b, wherein greater 6b dose caused greater rectal temperature drop and greater hypoactivity. Hypoactivity of mouse, after being administered compound 6b, was because 6b caused the mouse's body temperature to drop towards its ambient temperature (22° C.). When ambient equals optimal body temperature (37° C.), 6b cannot reduce body temperature and cannot cause hypoactivity. In some embodiments, the hypoactivity/sedation aspect to a compound(s) of this disclosure is utilized for therapy. The intersection between drug dose and ambient temperature dictates how much the body temperature falls and thence the depth of the sedation. Larger drug dose, and/or lower ambient temperature, causes deeper sedation (e.g. useful for inducing anaesthesia, pre-anaesthesia, post-anaesthesia, hypoesthesia, sedation, coma, tranquilization, behavioural submission, muscle relaxation and/or treating/ameliorating/preventing/combating insomnia, fatal insomnia, sleep onset latency, delayed sleep phase disorder, exploding head syndrome, parasomnia, sleep-maintenance insomnia, sleep disorder etc.; repeated/continuous administration, e.g. repeated i.v. injections or continuous i.v. infusion, of a compound(s) of this disclosure can sedate a subject for an extended period of time). Smaller drug dose, and/or higher ambient temperature, causes lighter sedation (e.g. useful for anti-anxiety, anti-depression, hyperactivity etc.). At ambient≥optimal body temperature (37° C.), no sedation occurs. Increasing sedation occurs with lower body temperature because action potential characteristics are temperature dependent. In some disclosure embodiments, deeper sedation is conveyed by a larger body temperature drop (body temperature<34° C.) and in other disclosure embodiments a slight calming sedation, optionally imperceptible to the subject, is conveyed by a smaller body temperature drop, optionally less than 1° C., optionally less than 0.5° C. To repeat, the intersection between dose and ambient temperature dictates the magnitude of body temperature drop, wherein this can be zero, even at high drug dose, when ambient temperature ≥37° C. So many diseases/disorders are because of too much/inappropriate/undesired signals/activity/electrical activity in the nervous system, wherein a compound(s) of this disclosure can decrease nervous system activity by a tunable degree (reduction amplitude set by intersection of drug dose with ambient temperature) and so can treat/ameliorate/prevent/combat an incredibly large number of diseases/disorders. Fundamental action equals broad applicability. Drug action against a fundamental physiological parameter (body temperature), which dictates a further fundamental physiological parameter (action potential characteristic(s): firing threshold/conduction velocity/firing frequency etc.), yields broad therapeutic application. For example, it raises the stimulus threshold for an epileptic seizure, which decreases the frequency of epileptic seizures in a subject. For example, it raises the stimulus threshold for ejaculation, therefore delaying ejaculation during sex, therefore assisting a subject with premature ejactulation. For example, it raises the threshold for pain perception and so any pain is reduced in magnitude. For example, in the brain, it raises the threshold for a “behaviour suggestion signal” to be selected for action, thence reducing the occurrence of unwanted behaviour (e.g. in Tourette's syndrome). Reduced temperature decreases action potential (AP) conduction velocity (Q₁₀=˜1.7, so AP velocity is ˜10% less at 35 than 37° C. 188, 891), decreases AP frequency (30% decrease in spike rate with 2° C. decrease in temperature [90]), increases AP firing threshold (AP firing threshold vs. temperature is U shaped because threshold increases as move away from an optimum temperature [91, 92]) and decreases neural circuit activity in vivo [93].

[0118] Because a compound(s) of this disclosure can cause sedation (when ambient<optimal body temperature {37° C.}) and slow aging, this juxtaposition makes a compound(s) of this disclosure useful for inducing hibernation/artificial hibernation/torpor/synthetic torpor/suspended animation, optionally used on a long journey, optionally during spaceflight, optionally on a journey to Mars (projected duration with present technology is ˜18 months transit time for round trip). Moreover because the compound(s) reduces food, power (e.g. reduced lighting/heating), living space and O₂ requirements in a subject, this makes the spacecraft load lighter, and the induced lower respiration rate means slower/shallower breathing, less O₂ in the body, which reduces the damaging effect of ionizing radiation (significant in space), moreover permitting a lower O₂ concentration outside the body, which reduces ionizing radiation damage to the outside of the body, and the smaller living space afforded by the sedation permits greater radiation shielding per unit living space and the induced hypometabolism reduces the rate of muscle and bone atrophy (reduces spaceflight osteopenia) and other negative health effects (e.g. sleep disturbance) of microgravity, and the sedation side-steps the anticipated worrying problem of interpersonal friction(s) during long confined spaceflight (Cosmonaut Valery Ryumin's autobiography: “If you want to instigate the art of manslaughter just shut two men up in a eighteen by twenty-foot cabin for a month. Human nature won't stand it.”). Optionally the drug can be administered by continuous intravenous infusion, wherein optionally respiratory substrates, nutrients, fluids etc. can be administered similarly (e.g. using parenteral nutrition). If there is a job/emergency that needs to be attended to in the spacecraft (and/or the subject is to eat/wash/administrate themselves etc.) the hibernation is paused by raising the ambient temperature of the subject to 37° C. Afterwards, assuming the subject still has sufficient compound(s) in their system, the hibernation can be induced again by lowering the ambient temperature. During spaceflight, the use of a compound(s) of this disclosure combats many of the problems identified for space exploration/travel by NASA Report No. IG-16-003 (“NASA's efforts to manage health and human performance risks for space exploration”, Oct. 29, 2015, audit conducted by Office of Inspector General).

[0119] An aspect of this disclosure is to use a compound(s) of this disclosure to sedate (or to help sedate) a subject undergoing treatment (e.g. surgery, e.g. surgery to remove a tumour), and/or a course of treatment, for a pathology/disease/disorder/dysfunction/unwanted characteristic(s) of the subject. For non-limiting example, for a subject undergoing drug (e.g. opoid) withdrawal, wherein a compound(s) of this disclosure is used to sedate the subject during their drug withdrawal phase so they don't suffer the, typically horrific (why many drug users can't get off drugs), withdrawal symptoms such as pain, nausea, craving etc., which are worst in the first few days of withdrawal, a common time of drug relapse.

[0120] Because a compound(s) of this disclosure can cause sedation (when ambient<optimal body temperature {37° C.}), slow aging and exert anti-cancer activity, these attributes make a compound(s) of this disclosure useful for a subject undergoing anti-cancer treatment, optionally during a hospital stay, wherein more than the time the subject loses sedated is returned to them by a longer [life/health] span. When the cancer patient has a visitor the sedation can be paused by raising the ambient temperature to 37° C. (e.g. by transferring the patient's bed trolly into a visitors area/room maintained at this temperature). If a light sedation (small body temperature drop, cancer patient remains conscious but calmer, cancer patient can go about their normal life) is instead chosen for a cancer subject, there is a useful juxtaposition in the compound(s) anti-cancer and anxiolytic and/or antidepressant effects, because many cancer patients are anxious/depressed, and there is benefit to the compound's analgesic and/or antiemetic effects also, if radio/chemo-therapy is used in co-therapy, because radio/chemo-therapy typically causes cancer patients pain and nausea/vomiting, often extreme. Optionally a compound(s) of this disclosure is taken before the subject wishes to sleep, for example at night, and so any perceptible sedation, should it occur with the dose taken at that ambient temperature, is then virtuous rather than limiting to normal life.

Co-Therapy with an Uncoupler(s)

[0121] An embodiment is to administrate an (preferably therapeutically effective) amount of at least one compound(s) that inhibits F₁F₀ ATP hydrolysis (e.g. at least one compound of at least one of Formula (I), (II), (III), (IV), (V), (VII), (VIII), [X]), optionally with an (preferably therapeutically effective) amount of the same or a different compound(s) that uncouples the proton motive force (an uncoupler), for use in a method of treatment of the human or animal body by therapy, wherein optionally the F₁F₀ ATP hydrolysis inhibitor(s) and uncoupler(s) are in a single pharmaceutical composition and/or are packaged, and/or distributed, and/or sold together, optionally for the treatment/amelioration/prevention/combat of cancer and/or a disease/disorder partially/completely driven by, or made worse, by activated macrophages (or similar activated cell type e.g. pancreatic islet macrophages/Langerhans cells/dendritic cells/monocytes/histiocytes/Hofbauer cells/Kupffer cells/phagocytes/microglia/epithelioid cells/osteoclasts/macrophage like cells/cells of the mononuclear phagocyte system, and/or any cell type(s) of the innate immune system and/or of the monocyte lineage, especially inducible nitric oxide synthase (iNOS) and/or iNOS2 expressing and/or NO producing cells {e.g. monocyte-derived inflammatory dendritic cells}; activated macrophages, unlike resting macrophages, singly use and thence completely rely upon ATP synthase in its reverse mode, hydrolysing ATP, to maintain Ψ_{IM} [94]) in a subject(s),
[0122] optionally to treat/ameliorate/prevent/combat HIV infection/transmission/drug resistance, optionally (optionally in the same pharmaceutical composition) with an effective amount of a compound(s), protein(s), antibody(s), pathogen(s) or pathogen component(s) that activates macrophages (isn't absolutely necessary because HIV activates macrophages itself [95.96], which drives the chronic inflammation pathology component to HIV infection; HIV stimulates nitric oxide production by human macrophages [97, 98, 99, 100]), optionally with a compound(s), protein(s), antibody(s), pathogen(s) or pathogen component(s) that polarises macrophages towards M1 type (examples, without restriction, include Granulocyte-macrophage colony-stimulating factor [GM-CSF]and/or a pharmaceutical version/analog(s)/biosimilar of GM-CSF such as, without limitation, one or more of sargramostim, molgramostim, regramostim, filgrastim, pegfilgrastim), optionally in co-therapy (optionally in same pharmaceutical composition) with, or after, Anti-Retroviral Therapy (ART), combination Anti-Retroviral Therapy (cART, Highly Active Anti Retroviral Therapy, HAART), optionally in co-therapy (optionally in same pharmaceutical composition) with L-arginine (substrate for inducible Nitric Oxide Synthase, iNOS, optionally wherein food(s) rich in this amino acid is eaten), optionally for pre- and/or post-exposure prophylaxis (PEP) e.g. after needlestick injury and/or sex with an HIV infected person(s), e.g. to reduce the probability of mother to baby HIV transmission during pregnancy/birth/breast feeding e.g. given to a subject without HIV to decrease the risk they will acquire HIV, optionally wherein this subject is at sizeable risk of acquiring HIV, wherein this pre-exposure prophylaxis can reduce the spread of HIV within a population (for example in sub-Saharan Africa). Even after prolonged cART, which drives plasma HIV down to undetectable levels, HIV-1 DNA and RNA is detectable in macrophages: they are an HIV reservoir that remains extant, even during cART, and that the virus can spread from during any interruption or termination of cART [101]. Moreover, HIV virus recombines and mutates in macrophages [102], which is a drive to HIV drug resistance. Thence the vital importance of the methods and compounds herein. By denying HIV a reservoir in which to hide (and mutate, developing drug resistance) from ART/cART/HAART therapy, a compound(s) of this disclosure, or a pharmaceutically-acceptable salt, solvate, hydrate or prodrug thereof, decreases the amount of HIV virus in the body, increasing the chance of HIV viral elimination from the subject, decreasing the risk the subject can transmit the HIV virus to another subject, decreasing HIV associated symptoms/pathology, decreasing the chance of HIV developing drug resistance to one or more drugs used in ART/cART/HAART therapy, improving clinical outcome. Notably, a compound(s) of this disclosure, or a pharmaceutically-acceptable salt, solvate, hydrate or prodrug thereof, treats/ameliorates/prevents/combats HIV-associated chronic inflammation and/or HIV peripheral neuropathy, wherein the latter is caused by infiltration of HIV infected monocytes/macrophages to the dorsal root ganglia (DRG) causing neuronal loss and formation of Nageotte nodules.

[0123] In some embodiments, the activity (e.g. anti-cancer and/or anti-HIV activity, incidentally wherein both these activities are pertinent for a subject with an AIDS defining or HIV-associated cancer) of the uncoupler(s) and F₁F₀ ATP hydrolysis inhibitor(s) synergize (potentiate).

### Slow Release Formulations

[0124] A disclosure embodiment is to administer to a subject a therapeutic amount of at least one compound of this disclosure, for example at least one compound of at least one of Formula (I), (II), (III), (IV), (V), (VII), (VIII), [X], in a formulation/dosage selected from modified release, extended release, long acting release, sustained release, prolonged release, controlled release, slow release or similar, as clear to someone of the art, for use in a method of treatment of the human or animal body by therapy. Such a formulation exposes the subject body to the compound(s) over a longer period of time than if the compound was applied alone. This is useful because it delivers good area under the curve for the compound, which for example exerts anti-cancer activity in the subject, without an abrupt large body temperature drop. Any body temperature drop is less in amplitude, more in duration, which is safer.

### Temperature Controlled Release

[0125] A disclosure embodiment is a temperature-sensitive pharmaceutical composition/vehicle that only releases a compound(s) of this disclosure, for example at least one compound of at least one of Formula (I), (II), (III), (IV), (V), (VII), (VIII), [X], and/or other F₁F₀ ATP hydrolysis inhibitor(s), when the body is at normal body temperature or higher. The latter is reached if the subject has a fever for example. Many cancers cause fever. Such a temperature-sensitive delivery composition/vehicle, releasing drug(s) at normal body temperature (37° C.) for example, can effect a safety feedback loop because as F₁F₀ ATP hydrolysis inhibitor is released, body temperature falls, thence less drug is released, body temperature can thence recover, further compound is released, and this loop iterates, implementing extended release and minimising the perturbation to body temperature from optimal. For non-limiting example, a F₁F₀ ATP hydrolysis inhibitor(s) is loaded into a structure incorporating biocompatible thermo-sensitive polymer which undergoes a volume change (e.g. shrinks) at a temperature exceeding its phase/volume transition temperature, releasing the compound. This volumetric change is reversible. Should the temperature subsequently fall below the phase/volume transition temperature, the volume change reverses (e.g. structure expands) and compound release doesn't occur [103]. In some embodiments the phase/volume transition temperature is tuned to be at normal body temperature, in other embodiments, at a pathologically elevated body temperature(s). Biocompatible thermosensitive polymers can be used to prepare temperature-responsive hydrogels/nanogels and thence nanoparticles, optionally with polysaccharides to modulate the drug encapsulation and release efficiency, which have a phase transition temperature, above which they release the “cargo” compound(s). Transition temperature can be readily tuned by the copolymerization conditions and by varying the content of repeating units in the copolymer. Non-limiting options for making temperature sensitive vehicles for compounds of this disclosure include thermosensitive hydrogels/nanogels, temperature sensitive liposomes [104-106](these have been used in clinical trials e.g. ThermoDox), thermosensitive micelles, polymeric micelles, core shell structures, core-shell microgel particles, thermoresponsive composite films, smart three dimensionally ordered porous materials, thermosensitive microcontainers, nanoscale drug delivery vehicles.

Some Methods of this Disclosure

[0126] Use of at least one compound according to Formula [X](optionally at least one compound of at least one of Formula (I), (II), (III), (IV), (V), (VI), (VII), (VIII); and/or a pharmaceutically-acceptable salt, solvate, hydrate or prodrug thereof, and/or a pharmaceutical composition thereof), and/or a selective/preferential F₁F₀ ATP hydrolysis inhibitor compound(s)/composition(s) (that preferably inhibits F₁F₀ ATP synthesis less or, more preferably, not at all), wherein an effective amount of compound(s)/composition(s) is administered to the subject topically/locally, wherein the reduction in metabolic heat generation at the administered body region(s) is substituted by heat transfer from other regions (e.g. by blood flow) of the subject's body, wherein this method delivers compound(s)/composition(s) conferred treatment to the administered body region(s) whilst the body temperature reduction side-effect of the compound(s)/composition(s) is mitigated/beaten, optionally wherein the administered body region(s) is one or more of the eye (or part(s) thereof), and/or ear (or part(s) thereof), and/or Central Nervous System/brain (or part(s)/cell type(s) thereof e.g. some or all dopamine neurons in the substantia nigra),
[0127] and/or skin (or part(s) thereof), and/or face (or part(s) thereof), and/or hair (or part(s) thereof), and/or a tumor/cancer (or part(s) thereof),
[0128] and/or wherein an effective amount of compound(s)/composition(s) is administered to the subject systemically,
[0129] and/or optionally the subject is monitored/observed/watched (optionally by a healthcare worker such as doctor, nurse, paramedic, EMT, vet, pharmacist, optionally by a research worker such as scientist, laboratory technician) after compound(s)/composition(s) administration for any adverse sign(s)/symptom(s)/abnormality,
[0130] and/or optionally the subject is located in an ambient temperature exceeding 30° C. and/or optionally the subject wears one or more items of clothing and/or optionally wherein the subject's body temperature is monitored (continuously or at regular/irregular time intervals),
[0131] and/or optionally wherein the greater the ambient temperature the subject is in, the greater the dose administered and/or optionally wherein the subject being in a higher ambient temperature can enable a higher dose to be administered,
[0132] and/or optionally wherein the ambient temperature to the subject, and/or their bodily insulation, is increased before they are administered with the compound(s)/composition(s),
[0133] and/or optionally wherein the subject moves to a different geography/space with a higher ambient temperature for compound(s)/composition(s) administration,
[0134] and/or optionally wherein a daily dose is spread over multiple doses per day so that any compound(s)/composition(s) driven body temperature drop in the subject is lowered in amplitude and lengthened in duration (which is safer),
[0135] and/or optionally wherein the subject stays/is inside a building, optionally which is heated (so hotter inside the building than outside), optionally their home, optionally their workplace, optionally a hospital, whilst they have an effective amount of compound(s)/composition(s) in their system,
[0136] and/or or optionally wherein the subject stays/is inside a vehicle, optionally which is heated (so hotter inside the vehicle than outside), whilst they have an effective amount of compound(s)/composition(s) in their system,
[0137] and/or optionally wherein the compound(s)/composition(s) is administered to the subject (e.g. once per day prior to sleep, e.g. once per day orally prior to sleep) at such time that the Cₘₐₓ and/or much/most/all of the “Area Under the Curve (AUC)” occur whilst the subject is asleep/resting/relaxing/trying to sleep/indoors/inside/working indoors and/or in a single place/area/home/house/building/complex/workplace/office/room/bedroom/confinement/vehicle for more than 3 hours (or for more than 5 hours, or for more than 8 hours, or for more than 10 hours, or for more than 12 hours), e.g. at night, and/or optionally wherein the subject sleeps/rests/relaxes/works in a higher ambient temperature, e.g. because of shelter and/or heating and/or insulation, than the outside/climate temperature in that location at that time,
[0138] and/or optionally wherein the temperature/climate/season/weather/weather forecast in that location at that time dictate if the compound(s)/composition(s) is, or is not, administered to the subject and at what dose, and/or optionally wherein the subject is administered (and/or self-administers) the compound(s)/composition(s) shortly before they sleep, preferably wherein they are sheltered (e.g. inside instead of outside) and/or insulated (e.g. by bedding(s)/blanket(s), and/or clothing, and the like) whilst they sleep, optionally in a heated room/building/confinement that is set to a higher (safe) temperature than outside it.
[0139] and/or optionally wherein the subject is administered with compound(s)/composition(s) in a workplace of healthcare professionals such as a hospital,
[0140] and/or optionally the subject is monitored, for example by a healthcare/research professional(s) and/or machine substitute(s), for sign(s) of reduction in body temperature and/or the subject is located at an ambient temperature that maintains their body temperature within safe limits whilst they have an effective amount of compound(s)/composition(s) in their system and/or whilst the subject has an effective amount of compound(s)/composition(s) in their system the subject wears (and/or is covered by) insulating material(s), e.g. clothing/clothes (and/or bedding/blanket(s)), and/or is in a heated/insulated confinement/building/room/space (e.g. for conferring heat/hyperthermia therapy e.g. as used for cancer therapy) and/or hot climate, optionally exceeding one or more of 24° C., 25° C., 26° C., 27° C., 28° C., 29° C., 30° C., 31° C., 32° C., 33° C., 34° C., 35° C., 36° C., 37° C., 38° C., 39° C., 40° C., 41° C., 42° C., 43° C., 44° C., 45° C., 46° C., 47° C., 48° C., 49° C., 50° C., 51° C., 52° C., 53° C., 54° C., 55° C. optionally at or around 37° C., wherein a higher (e.g. in the thirties/forties ° C.), but safe, ambient temperature (and/or greater bodily insulation, for example by clothing/clothes and/or bedding/blanket(s)) can permit a greater compound(s)/composition(s) dose(s) to be safely administered, wherein a preferred ambient temperature is the thermoneutral temperature for the subject with the amount of bodily insulation they have, e.g. the amount of clothing they are wearing, if any, and the amount of the compound(s)/composition(s) in their system; and/or optionally wherein the subject's ambient temperature is measured, and/or inferred/estimated from information sourced (e.g. local weather report/prediction), before the subject is administered with compound(s)/composition(s), optionally wherein this data is used to select, or as one factor of multiple in selecting, the compound(s)/composition(s) dose administered to the subject;
[0141] and/or optionally wherein the subject's body temperature is measured whilst they have an amount of compound(s)/composition(s) in their system;
[0142] and/or optionally wherein the administered compound(s)/composition(s) dose doesn't reduce the subject's body temperature;
[0143] and/or optionally wherein the administered compound(s)/composition(s) dose doesn't reduce the subject's body temperature below their normal/typical body temperature;
[0144] and/or optionally wherein the administered compound(s)/composition(s) dose doesn't reduce the subject's body temperature lower than normal body temperature;
[0145] and/or optionally wherein administration of the compound(s)/composition(s) dose doesn't reduce the subject's body temperature at all or not more than 0.001 or 0.01 or 0.1 or 0.5 or 1 or 2 or 3° C. lower than the subject's body temperature before the administration of said compound(s)/composition(s); and/or optionally wherein administration(s) of the compound(s)/composition(s) dose doesn't reduce the subject's body temperature at all or not more than 0.001 or 0.01 or 0.1 or 0.5 or 1 or 2 or 3° C. lower than the subject's body temperature before the administration(s) of said compound(s)/composition(s), optionally wherein the subject's body temperature is measured one or more times within 1, and/or 5, and/or 10, and/or 30 minutes, and/or 1 hour, and/or 3 hours, and/or 6 hours, and/or 24 hours after the administration(s) of said compound(s)/composition(s);
[0146] and/or optionally wherein the administered compound(s)/composition(s) dose is the highest dose, or a fraction thereof, that doesn't, or that apparently doesn't, reduce the subject's body temperature at all or, if it does reduce body temperature, it only does so by a small amount (e.g. less than 1° C., or less than 0.1° C. or less than 0.01° C.);
[0147] and/or optionally wherein a different compound(s)/composition(s) dose is administered to a subject if they are in a different ambient temperature;
[0148] and/or optionally wherein a different compound(s)/composition(s) dose is administered to a subject if they are in a different ambient temperature and the ambient temperature is less than 37° C.; and/or optionally wherein a higher compound(s)/composition(s) dose is administered to a subject if they are in a higher ambient temperature;
[0149] and/or optionally an experiment(s) is performed in which different subjects (optionally rodents/mice) are kept at different temperatures (or within different temperature ranges) whilst having an amount of the compound(s)/composition(s) in their system;
[0150] and/or optionally a method comprising the following steps is conducted:
   [0151] (a) compound(s)/composition(s) is administered to the subject,
   [0152] (b) the subject's body temperature is measured sometime after (optionally recorded in vitro/ex vivo by recording the temperature/intensity of a sample(s)/electromagnetic radiation from the subject, optionally recorded non-invasively e.g. via thermal imaging),
      [0153] (c1) if the subject's body temperature is higher than, or at, normal body temperature (e.g. ˜37° C. for a human) or is reduced, but is still within desired/acceptable limits, further compound(s)/composition(s) is administered immediately/later at higher or same dose (especially/preferably selecting “same dose” if prior iteration(s) of this loop, comprising steps (a-c), have shown a higher than this present dose to produce unacceptably low body temperature(s)), wherein this compound(s)/composition(s) administration can be a step (a) for another iteration of steps (a-c),
      [0154] (c2) but if instead the subject's body temperature is lower than the desired/acceptable limit/range, optionally which can be the normal non-pathological body temperature (or range thereof) of a subject of this species, by contrast the subject is immediately/later administered no or less (e.g. 0.05%/10%/25%/50%/5%/90% or other % of immediately prior mg/kg dose, optionally wherein the % is tailored to the amount of body temperature reduction, whereby a smaller % is administered when the body temperature reduction is greater) compound(s)/composition(s) or the subject is administered with same/no/lower/higher compound(s)/composition(s) dose and the subject's ambient temperature and/or bodily insulation is increased, wherein if there is compound(s)/composition(s) administration it can be a step (a) for another iteration of steps (a-c),
   [0155] (d) wherein this system (steps a-c) can be iterated for a desired/selected/arbitrary number of iterations, optionally only stopping iterating once the desired or an acceptable level of disease/disorder therapy/treatment/prevention has occurred,
   [0156] (e) optionally wherein there is a preceding step, which is only executed once as the very first step, and which isn't included in subsequent iterations, wherein the subject's ambient temperature (or range thereof) and/or insulation is increased before compound(s)/composition(s) administration, optionally—in an alternative schema—the only steps in this schema are this present preceding step and step (a), wherein steps (b-c) are not included,
   [0157] (f) optionally wherein there is a preceding step to the aforementioned preceding step, or alternatively wherein this preceding step replaces the aforementioned preceding step, wherein the subject's body temperature is measured (optionally recorded in vitro/ex vivo by recording the temperature/intensity of a sample(s)/electromagnetic radiation from the subject, optionally recorded non-invasively e.g. via thermal imaging), optionally wherein if the subject's body temperature is less than normal, or alternatively not higher than normal, then the subsequent steps are not implemented,
   [0158] (g) optionally wherein different iterations of this system and/or step(s) thereof can be performed when the subject is in different ambient temperatures (or ranges thereof) and/or has different amounts of bodily insulation,
   [0159] (h) optionally wherein this system is started with a low mg/kg compound(s)/composition(s) dose and/or with a compound(s)/composition(s) dose lower than that shown to reduce body temperature to an undesirable/unacceptable degree at that (or similar) ambient temperature in another subject(s) of the same species, and more preferably of the same gender and of similar mass, optionally of similar age,
   [0160] (i) in some embodiments the subject is a human and in alternative embodiments the subject is a non-human species, preferably a mammal; and/or optionally wherein one or more of the following (Roman numeral points) applies when the subject has an effective amount of the compound(s)/composition(s) in their system:
   [0161] (I) the subject is sheltered and/or heated and/or insulated and/or clothed;
   [0162] (II) the subject is in a room/building/vehicle/shelter which has a higher ambient temperature than the ambient temperature outside;
   [0163] (III) the subject is in a heated and/or insulated area/confinement/room/building/vehicle/shelter;
   [0164] (IV) the subject wears one or more items of clothing;
   [0165] (V) the subject wears one or more items of clothing in a heated and/or insulated area/confinement/room/building/vehicle/shelter;
   [0166] (VI) the ambient/air temperature experienced by the subject is hotter than the climatic/outside/apparent air temperature in their geography at the time;
   [0167] (VII) the ambient/air temperature experienced by the subject, underneath their worn clothing/clothes, is hotter than the climatic/outside/apparent air temperature in their geography at the time;
   [0168] (VIII) the ambient/air temperature experienced by the subject is hotter than the climatic/outside/apparent air temperature in their geography at the time because of one or more of the subject being sheltered, heated (e.g. by the heating system of a room/building/vehicle that the subject is in), in a confinement with elevated humidity (e.g. wherein the subject is in a sauna or similar), the subject wears one or more items of clothing, the subject is covered by one or more insulating materials (e.g. blanket(s)/sheet(s));
   [0169] (IX) the subject is sheltered from one of more of the weather elements, including wind and/or rain/snow, by a building/vehicle/shelter and/or one or more items of clothing;
   [0170] (X) liquid (e.g. water) that the subject drinks is heated and is hotter than ambient temperature when it is drunk by the subject;
   [0171] (XI) food that the subject eats is cooked/heated and is hotter than ambient temperature when it is eaten by the subject;
   [0172] (XII) the subject is in a room/budling/complex/tunnel system underground in a higher ambient temperature than the ambient temperature overground at the same latitude and longitude;
   [0173] (XIII) the subject is in an underground burrow/room/building/complex/tunnel system, preferably which is situated in a tropical/equatorial climate region;
   [0174] (XIV) the subject is in an underground burrow/room/building/complex/tunnel system, situated in a tropical/equatorial climate region (e.g. Kenya), which ensures it is consistently warm, buffered from weather fluctuations (e.g. tropical rain storms) overground;
   [0175] (XV) the subject is in an underground burrow/room/building/complex/tunnel system with rooms and/or living/working/recreation/sleeping areas/quarters at different depths underground, which can thence inherently have different temperatures, and wherein the subject can select their ambient temperature by selecting their depth;
   [0176] (XVI) the subject's body temperature reduces/is reduced;
   [0177] (XVII) the subject's body temperature is not reduced, or isn't reduced by as large an amplitude, because of one or more of the above Roman numeral points applies/is implemented; alternatively wherein the compound(s)/composition(s) is administered to the subject to deliberately reduce their body temperature, optionally to a desired/specified/controlled temperature (or range thereof), wherein the amplitude of hypothermia conferred in the subject by the compound(s)/composition(s) administration is controlled by setting the ambient temperature, wherein a sufficient amount of administered compound(s)/composition(s) reduces subject body temperature to slightly higher than their ambient temperature, such that hypothermic amplitude is controlled by controlling ambient temperature; alternatively wherein the compound(s)/composition(s) is administered to the subject to deliberately reduce their body temperature, optionally to a desired/specified/controlled body temperature (or range thereof), wherein the amplitude of hypothermia conferred in the subject by the compound(s)/composition(s) administration is set by setting the quantity of compound(s)/composition(s) administered and/or setting the ambient temperature, wherein a larger dose can lower the subject's body temperature to nearer/near (but always above, if the subject is alive) the ambient temperature and a smaller dose can lower it by a fraction thereof;
[0178] alternatively wherein the compound(s)/composition(s) is administered to the subject to deliberately reduce their body temperature to a desired/specified/controlled temperature (or range thereof), wherein a sufficient amount of administered compound(s)/composition(s) reduces subject body temperature to a temperature that it cannot fall below because the subject is heated by incident electromagnetic radiation (optionally the intensity of which is controlled by servocontrol, with the set point set at the desired hypothermic body temperature, optionally from a radiation heater), which “catches” and offsets the hypothermic drive of an administered compound(s)/composition(s), at a desired/specified hypothermic body temperature (or range thereof);
[0179] and/or optionally wherein the administered compound(s)/composition(s) dose reduces an abnormally/pathologically elevated body temperature;
[0180] and/or optionally wherein the administered compound(s)/composition(s) dose reduces an abnormally/pathologically elevated body temperature (or range thereof) to normal body temperature (or range thereof);
[0181] and/or optionally wherein the administered compound(s)/composition(s) dose is that which reduces body temperature by the desired amount;
[0182] and/or optionally a method comprising the following steps is conducted:
   [0183] (α) compound(s)/composition(s) is administered to the subject,
   [0184] (β) the subject's body temperature is measured sometime after (optionally recorded in vitro/ex vivo by recording the temperature/intensity of a sample(s)/electromagnetic radiation from the subject, optionally recorded non-invasively e.g. via thermal imaging),
      [0185] (γ1) if the subject's body temperature is not at, or not lower, than normal body temperature (e.g. ˜37° C. for a human), or is not low enough to be within a desired range of lower body temperature, compound(s)/composition(s) is administered immediately/later at higher (e.g. 110%/150%/200% or other %, that is >100%, of immediately prior mg/kg dose) or same dose (especially/preferably selecting “same dose” if prior iterations of this loop have shown that this dose can reduce body temperature to the desired value/range of body temperature) or the subject is administered with same/no/higher/lower compound(s)/composition(s) dose and the subject's ambient temperature and/or bodily insulation is decreased, wherein if there is compound(s)/composition(s) administration it can be a step (α) for another iteration of steps (α-γ),
      [0186] (γ2) but if instead the subject's body temperature is within the desired range of body temperature, by contrast the subject is immediately/later administered same, no or less compound(s)/composition(s), wherein if there is compound(s)/composition(s) administration it can be a step (a) for another iteration of steps (α-γ),
      [0187] (γ3) but if instead the subject's body temperature is reduced, and it is actually lower than the desired range of reduced body temperature, by contrast the subject is immediately/later administered no or lower (e.g. 0.05%/10%/25%/50%/5%/90% or other % of immediately prior mg/kg dose, optionally wherein the % is tailored to the amount of excess unwanted body temperature reduction, whereby a smaller % is administered when the excess unwanted body temperature reduction is greater) compound(s)/composition(s) dose or the subject is administered same/no/lower/higher compound(s)/composition(s) dose and the subject's ambient temperature and/or bodily insulation is increased, wherein increasing the subject's ambient temperature to be just below the desired body temperature is particularly effective for correcting this overshoot error, wherein if there is compound(s)/composition(s) administration it can be a step (a) for another iteration of steps (α-γ),
   [0188] (δ) wherein steps (α-γ) can be iterated for a desired/selected/arbitrary number of iterations, optionally only stopping iterating once the desired or an acceptable level of disease/disorder therapy/treatment/prevention/surgery has occurred,
   [0189] (ε) optionally wherein there is a preceding step, which is only executed once as the very first step, and which isn't included in subsequent iterations, optionally wherein the subject's insulation is decreased before compound(s)/composition(s) administration, critically wherein the ambient temperature (or range thereof) is set to be below the desired reduced body temperature (or range thereof) and optionally wherein the ambient temperature is set to be 0.1-3° C. below the desired reduced body temperature or optionally further below, optionally—in an alternative schema—the only steps in this schema are this present preceding step and step (α), wherein steps (β-γ) are not included,
   [0190] (ζ) optionally wherein there is a preceding step to the aforementioned preceding step, or alternatively wherein this preceding step replaces the aforementioned preceding step, wherein the subject's body temperature is measured (optionally recorded in vitro/ex vivo by recording the temperature/intensity of a sample(s)/electromagnetic radiation from the subject, optionally recorded non-invasively e.g. via thermal imaging),
   [0191] (η) optionally wherein different iterations of this system and/or step(s) thereof can be performed when the subject is in different ambient temperatures (or ranges thereof) and/or has different amounts of bodily insulation,
   [0192] (η) optionally wherein the subject is also administered with a drug(s), preferably (but not restrictively) FDA/EMA licensed, to prevent/reduce/treat shivering (e.g. (to illustrate and not limit) one or more of acetaminophen, buspirone, an opioid(s) including pethidine (meperidine), dexmedetomidine, fentanyl, propofol, paralytic medication like vecuronium, a general anaesthetic(s)),
   [0193] (θ) in some embodiments the subject is a human and in alternative embodiments the subject is a non-human species, preferably a mammal;
[0194] in some embodiments a compound(s) of Formula (I) is administered (and/or a pharmaceutically-acceptable salt, solvate, hydrate or prodrug thereof, and/or a pharmaceutical composition thereof).
   Some Pharmaceutical Compositions of this Disclosure

[0195] A pharmaceutical composition comprising at least one compound (and/or a pharmaceutically-acceptable salt, solvate, hydrate or prodrug thereof) as defined in Formula [X](optionally at least one compound of at least one of Formula (I), (II), (III), (IV), (V), (VI), (VII), (VIII)) and at least one of a pharmaceutically-acceptable carrier(s), additive(s), diluent(s);
[0196] optionally wherein the pharmaceutical composition confers modified/controlled/extended/sustained/prolonged/slowed/delayed/pulsed/pulsatile/accelerated/fast/target ed/programmed release of the compound(s) when administered to a subject, optionally such that its constituent compound(s) amount/dose causes a smaller maximal drop, or no drop, in the subject's body temperature (but wherein the duration of the subject's body temperature drop might be extended, all be it at less amplitude: i.e. possibly less in amplitude and more in duration) than if this same/equivalent compound(s) amount/dose was administered to the subject alone or in an uncontrolled release pharmaceutical composition;
[0197] optionally wherein the pharmaceutical composition confers temperature controlled release of the compound(s) when administered to a subject,
[0198] optionally wherein the pharmaceutical composition only/preferentially releases compound(s) when subject body (or part(s) thereof) temperature is normal (e.g. within normal/typical/physiological limits range for the subject) and/or higher than normal, optionally wherein it is higher because of exogenous heating of the subject's entire body (e.g. in a device for conferring heat/hyperthermia therapy e.g. as sometimes used clinically for anti-cancer therapy) or body part(s), wherein a body part(s) where drug release is desired, e.g. in a cancer/tumor, is exogenously heated by a method(s) of the art (e.g. by incident electromagnetic radiation),
[0199] optionally wherein it is higher because of fever,
[0200] optionally wherein it is higher at a pathologically elevated temperature;
[0201] optionally wherein the pharmaceutical composition only/preferentially releases compound(s) in vivo at one or more of >48° C., >47° C., 46° C., >45° C., >44° C., >43° C., >42° C., >41° C., >40° C., >39° C., >38° C., >37° C., >36° C., >35° C., >34° C., >33° C., >32° C., >31° C., >30° C.;
[0202] optionally wherein the pharmaceutical composition only/preferentially releases compound(s) when subject body (or part(s) thereof) temperature is normal (e.g. within normal/typical/physiological limits range for the subject) and/or higher than normal, such that when the composition is administered to the subject it releases compound(s), which reduces subject body (or part(s) thereof) temperature, such that less/no compound(s) is then released per unit time and so the reduction in subject body (or part(s) thereof) temperature is slowed/abated and/or subject body (or part(s) thereof) temperature rises, if it rises enough then more compound(s) is released per unit time, and the loop iterates again one or more times such that subject body (or part(s) thereof) temperature drop is less in amplitude than if this same/equivalent compound(s) amount/dose was administered to the subject alone or in an uncontrolled release pharmaceutical composition;
[0203] optionally wherein the pharmaceutical composition comprises/includes one or more of biocompatible thermosensitive polymer (optionally with polysaccharide(s) to modulate the drug encapsulation and release efficiency), which undergoes a volume change at a temperature exceeding its phase/volume transition temperature, which releases the compound(s), preferably wherein the volume change is reversible if the temperature subsequently falls below the phase/volume transition temperature, preferably wherein the phase/volume transition temperature is tuned/set (optionally by tuning copolymerization conditions and by varying the content of repeating units in the copolymer) to be at normal subject body temperature or at a higher temperature, for example at a pathologically elevated body temperature, and/or at a tumor temperature and/or at an exogenously heated body/body part(s) temperature;
[0204] optionally wherein the pharmaceutical composition confers a trigger, wherein the trigger is one or more exogenously controlled stimuli (e.g. selected from temperature, ultrasonic, electronic etc.), controlled release of the compound(s) when administered to a subject;
[0205] optionally wherein the pharmaceutical composition confers a trigger, wherein the trigger is one or more cancer associated stimuli, controlled release of the compound(s) when administered to a subject;
[0206] optionally wherein the pharmaceutical composition confers pH controlled release of the compound(s) when administered to a subject, optionally only/preferentially releasing compound(s) when in an acidic environment, wherein extracellular acidity is a hallmark of cancers using Warburg metabolism; optionally wherein the pharmaceutical composition confers dual temperature and pH controlled release of the compound(s) when administered to a subject,
[0207] optionally only/preferentially releasing compound(s) when the composition is in a body area hotter than normal subject body temperature and in an acidic environment;
[0208] optionally wherein the pharmaceutical composition comprises/includes one or more of temperature responsive nanoparticle, thermosensitive hydrogels/nanogel, liposome, temperature sensitive liposome, heat-activated liposome (lysolipid thermally sensitive liposome) as used in Thermadox® (optionally used with exogenous heating by one or more of radiofrequency thermal ablation {RFA}, microwave hyperthermia, or high-intensity focused ultrasound {HIFU}), thermosensitive micelle, polymeric micelle, core shell structure, core shell microgel particle, thermoresponsive composite film, smart three dimensionally ordered porous material, thermosensitive microcontainer, nanoscale delivery vehicle; optionally wherein the pharmaceutical composition is distributed/sold/administered with a verbal/written communication (optionally in a paper insert/leaflet in a packet(s) containing the composition(s) {optionally called “instructions for use”, and/or “prescribing information” and/or “patient information leaflet”}) that its administration to a subject can cause their body temperature to drop [optionally informing that this is especially the case if a large/excess (e.g. more than the recommended) dose(s) is administered, optionally informing that this is especially the case if the subject is a child/baby (optionally informing that it is unsuitable for children and/or babies {optionally with the caveat that it can be administered to them if they are in a temperature controlled environment e.g. infant incubator/radiant warmer})] and optionally with one or more instructions to carry out should this body temperature drop happen to the subject (e.g. the subject should wear more clothes, wear warmer clothes, locate in a hotter environment, tell a doctor or pharmacist, go to a hospital) and/or optionally informing that the subject should/must minimize/stop alcohol intake (and/or other drug(s) intake that can affect thermoregulation such as a phenothiazine {like chlorpromazine etc.}, thioxanthenes etc.) for a period if this pharmaceutical composition is administered to the subject;
[0209] optionally wherein the pharmaceutical composition also comprises/includes one or more of an uncoupler (an uncoupler is a molecule that can bind a proton(s) in the mitochondrial intermembrane space (IMS), move across the mitochondrial inner membrane, and release the proton(s) in the mitochondrial matrix, which dissipates the proton motive force (pmf), and that can then return to the IMS, and repeat this sequence iteratively), optionally wherein the body temperature reduction drive in a subject that administration of the pharmaceutical composition causes, because of its componentry F₁F₀ ATP hydrolysis inhibitor(s)/reducer(s), is completely/partially cancelled/offset by the body temperature increase drive caused by a componentry uncoupler(s) in the same pharmaceutical composition, such that the subject's body temperature change is smaller in absolute value (optionally zero) than if either the amount of F₁F₀ ATP hydrolysis inhibitor(s) or uncoupler(s) was administered alone and/or in the pharmaceutical composition without the other component, optionally wherein a componentry F₁F₀ ATP hydrolysis inhibitor compound is also an uncoupler, optionally wherein these two opposite subject body temperature modifying aspects of the same compound completely or partially cancel such that the subject's body temperature is not much changed, if at all, by administration of this pharmaceutical composition, optionally wherein a combination of F₁F₀ ATP hydrolysis inhibitor(s) and uncoupler(s) compounds in the same pharmaceutical composition exerts greater anti-cancer activity when administered to a subject than if the same amount of either was administered without the other in the pharmaceutical composition, optionally wherein the combination amount of an F₁F₀ ATP hydrolysis inhibitor(s) and uncoupler(s) compounds in the same pharmaceutical composition is synergistic for anti-cancer activity; optionally wherein the pharmaceutical composition also comprises/includes one or more of a compound(s) that inhibits UCP2 (e.g. genipin and/or cisplatin);
[0210] optionally wherein the pharmaceutical composition also comprises/includes one or more of a cyclodextrin(s);
[0211] optionally wherein the pharmaceutical composition also comprises/includes one or more of a fatty acid(s);
[0212] optionally wherein the pharmaceutical composition is distributed/sold/administered with a verbal/written communication (optionally in a paper insert/leaflet in a packet(s) containing the composition(s) (optionally called “instructions for use”, and/or “prescribing information” and/or “patient information leaflet”)) that it should not be administered to a female subject who is pregnant (optionally delimiting this to early pregnancy, optionally to the first two months or first month or first 3 weeks or first 2 weeks or first week or for a number of days that is less than the number of days in 2 months) and/or who is trying/wants to get pregnant over the period of administration and/or that it should not be administered within the early days and/or weeks of a subject's pregnancy and/or in the early days (e.g. up to one of 1, 2, 3, 4, 5, 6, 7, 8, 9, 10, 11, 12, 13, 14, 15 days later) and/or weeks after having (optionally unprotected) sex with the intention/want (at the time and/or retrospectively) of getting pregnant;
[0213] in some embodiments a compound(s) of Formula (I) (and/or a pharmaceutically-acceptable salt, solvate, hydrate or prodrug thereof) is part or all of the pharmaceutical composition.
   Using a Compound of this Disclosure to Appraise the Efficacy of a Drug Delivery Technology

[0214] A method comprising:
[0215] measuring the amplitude and/or duration of body temperature drop (if any) caused in a subject by their being administered one or more compounds according to Formula [X] {optionally at least one compound of at least one of Formula (I), (II), (III), (IV), (V), (VI), (VII), (VIII)} and/or a pharmaceutically-acceptable salt, solvate, hydrate or prodrug thereof, and/or a pharmaceutical composition thereof, and/or a selective/preferential F₁F₀ ATP hydrolysis inhibitor compound(s)/composition(s) (that preferably inhibits F₁F₀ ATP synthesis less or, more preferably, not at all), wherein the compound(s)/composition(s) can be administered by a drug administration route/device/technology (e.g. transdermal skin patch), optionally in a pharmaceutical composition, wherein the amplitude and/or duration of body temperature drop (and optionally what amplitude and/or duration occurs in different parts of the body e.g. viewed by thermal imaging) reports on the efficacy/associated pharmacokinetics of one or more of the drug administration route/device/technology/composition selected, which can inform upon the merit(s) (or lack thereof) of this/these for effective/desirable administration of this compound(s) to the subject, optionally wherein different routes and/or devices/technologies of drug administration and/or different pharmaceutical compositions are trialed, wherein this can particularly report on the merit(s) (or lack thereof) of a pharmaceutical composition(s) for effective/desired characteristic(s) of drug administration, optionally wherein this is leveraged in experiment(s) to research/test/tune/optimize/select/design/improve the component(s) of a pharmaceutical composition to deliver effective/desired characteristic(s) of drug administration in a subject, optionally wherein the amplitude and/or duration of body temperature drop can be measured by the energy (e.g. by ambient temperature and/or electromagnetic wave {e.g. infra-red, e.g. IR-A e.g. from 0.78 to 1.4 μm wavelength}heating, preferably wherein the amount of electrical energy the heating device(s) uses is monitored) that needs to be inputted into the subject body to keep their body temperature constant, or nearly so, and/or at a life permissive body temperature, optionally wherein adaptive heating is utilized, which adjusts the heating element output {e.g. an infrared lamp, radiant warmer, incubator or any other heating element(s)} in response to the measured body temperature {e.g. measured by rectal temperature probe or by thermal imaging, or any other body temperature measuring/recording device(s)};
[0216] it is novel for the effective amount of a drug(s) in a subject body to have such an easy simple (optionally continuous e.g. if rectal probe is kept in continuously e.g. if thermal imaging is continuous) physiological readout, as in this case with body temperature {more typically to find the amount of a drug in a subject body, blood/plasma/serum samples are taken and analysed, wherein the result(s) doesn't necessarily report on the pharmacologically effective fraction, and the view is definitely not continuous but is of snapshots which require labour to take: more snapshots requires more work, more consumables consumed and greater disturbance of the subject};
[0217] any method that uses a drug(s) that causes a body temperature drop in a subject to research/test/tune/optimize/select/design/improve a pharmaceutical composition/formulation and/or a drug(s) delivery route/device/technology is componentry to this method;
[0218] this method also encompasses its use with one or more of a candidate/trial/novel (as yet unproven) pharmaceutical composition(s), drug(s) administration/delivery route(s)/device(s)/technology(s);
[0219] an optional step of this method is to heat the pharmaceutical composition to be at or close to the normal body temperature of the subject before it is administered to the subject;
[0220] in some embodiments a compound(s) of Formula (I) is used (and/or a pharmaceutically-acceptable salt, solvate, hydrate or prodrug thereof, and/or a pharmaceutical composition thereof) in this method.

### DETAILED DESCRIPTION OF THE DRAWINGS

[0221] For purposes of clarity, not every component is labelled in every figure, nor is every component of each embodiment of this disclosure shown where illustration is not necessary to allow those of ordinary skill in the art to understand the disclosure.

[0222] Herein incorporated by reference, in entirety, are the Drawings, and corresponding figure legends, of PCT/EP2018/069175 (published as WO2019/012149A1) and Canadian application number 3,050,553, and the experimental data, and associated writing/analysis/explanation, in applicant's reply to the “written opinion of the International Search Authority” for PCT/EP2018/069175, which is publically available on the European Patent Register file for the EP entry of this PCT: EP application number 18746115.7 [published as EP3652156].

Inhibiting/Reducing F₁F₀ ATP Hydrolysis in Cancer Cells Exerts Anti-Cancer Activity

[0223] FIG. 8 in PCT/EP2018/069175 (and also FIG. 8 in Canadian application number 3,050,553) shows the structure of compounds 6a and 6b, which are opposite stereoisomers (R and S respectively) with a hydrogen on their chiral carbon, wherein 6b can potently inhibit/reduce F₁F₀ ATP hydrolysis and 6a cannot, wherein they are both shown to have anti-cancer activity in vitro in NCI-60 anti-cancer testing, wherein 6b exerts anti-cancer activity by reducing reduce F₁F₀ ATP hydrolysis in cancer cells, and 6a exerts anti-cancer activity by epimerizing to be 6b in a biological system. FIG. 10 in Canadian application number 3,050,553 (and also applicant's reply to the “written opinion of the International Search Authority” for PCT/EP2018/069175) shows the structure of compounds 7a and 7b, which are the same as 6a and 6b respectively, except that they have deuterium (enrichment) instead of hydrogen on their chiral carbon, and so by the Kinetic Isotope Effect (KIE) their racemization rate is slower, wherein 7b is shown to have greater anti-cancer activity than 6b, because 7b epimerizes to 7a more slowly than 6b epimerizes to 6a, and 7a is shown to have less anti-cancer activity than 6a, because 7a epimerizes to 7b more slowly than 6a epimerizes to 6b. FIG. 11 in Canadian application number 3,050,553 shows the structure of compounds 8a and 8b, which are the same as 6a and 6b respectively, except that they have methyl instead of hydrogen on their chiral carbon, wherein because these compounds cannot interconvert by racemization, it would be expected for 8b to have potent, and for 8a to have little, anti-cancer activity, but wherein surprisingly this isn't observed, wherein this figure is reproduced herein as FIG. 1.

[0224] FIG. 1: Chiral supercritical fluid chromatography (SFC) was used to separate the shown racemate into its component R and S stereoisomers and two samples of opposite >97% enantiomeric excess (ee) was achieved: termed 8a and 8b respectively. 8a and 8b differ from 6a and 6b because they have methyl (Me, CH₃), instead of hydrogen (H), upon their chiral carbon. 8a and 8b were independently tested in NCI one-dose (10 μM) testing [107-108]: their results are shown in FIGS. (1B) and (1C) respectively. The anti-cancer activity of 8a and 8b against the different cancer cell lines of the NCI-60 assay was correlated i.e. the greater, and lesser, of their anti-cancer activity was against the same cell lines (Pearson correlation: R =0.5669, significant at p<0.00001). This correlation is notably less than for 6a vs. 6b (0.7991) and 7a vs. 7b (0.8049).

[0225] (1D) Recasts data from FIGS. 1B and 1C. Null hypothesis: equal (0.5) probability that x-axis value is positive (+ve) or negative (−ve): that 8a or 8b is the more powerful stereoisomer for any given cell line. Binomial probability of observed number of +ve (45) and −ve (15) {n=60}=0.00004613852. P-value (one-tailed) for 45 or more +ve (n=60)=0.000091. Conclusion: 8b has greater anti-cancer activity than 8a at 10 μM. But one can see that there are notable exceptions, which are discussed now with 1E.

[0226] (1E) 8a and 8b NCI one-dose (10 μM) test results side by side. % cancer growth inhibition >100 means there are less cancer cells at experiment end than beginning (i.e. cancer killing activity), =200=all cancer cells dead at experiment end. The observed pattern of 8a vs. 8b activity is hard to explain. One would expect one stereoisomer to have greater or equal activity than the other. Whereas here, 8b mostly has greater activity, and in some cases much greater (e.g. Δ=85.34% with MDA-MB-231/ATCC), but in some cases 8a has the much greater activity (e.g. Δ=38.57 with A498). Moreover, for one cancer cell line (NCI-H322M), 8a has no activity, yet 8b does. While not wishing to be bound by theory, the following model can explain these results, wherein the anti-cancer activity of 8a and 8b is set by (1) the cancer's sensitivity to a specific F₁F₀ ATP hydrolysis inhibitor, which can vary between different cancer cell lines, and (2) the activity of an enzyme(s) that hydroxilates the methyl group (CH₃) of 8a and 8b to CH₂OH, which can vary between different cancer cell lines, wherein this enzyme(s) is referred to herein as CYP, but it needn't necessarily be a Cytochrome P450 enzyme(s) as other hydroxylase/monooxygenase enzymes are known to those of the art:

[chemical structure]

[0227] Moreover, the ability to exert specific F₁F₀ ATP hydrolysis inhibition, and thence anti-cancer activity, is ranked: R (CH₂OH)>S (CH₂OH)≈S (Me)>R (Me), wherein R/S refers to stereochemistry and the group in brackets is the group on the chiral carbon. If CYP activity is low or non-existant, R (Me) and S (Me) are the predominant intracellular species of 8a and 8b respectively, and so, for anti-cancer activity, 8a<8b. If CYP activity is high, R (CH₂OH) and S (CH₂OH) are the predominant intracellular species of 8a and 8b respectively, and so, for anti-cancer activity, 8a >8b. It is hard to delinearate which of S (CH₂OH) and S (Me) has the greater F₁F₀ ATP hydrolysis inhibitory, and thence anti-cancer, activity. S (Me) does have anti-cancer activity, as observed with MDA-MB-231/ATCC, when 8a activity is much lower than 8b and so CYP activity must be low, thence S (Me) predominates. Yet S (CH₂OH) does have anti-cancer activity because 8b can still exert anti-cancer activity when 8a can. The NCI-H322M cancer cell line, against which 8a has no anti-cancer activity, may have a mutation in, and/or especially low expression of, the relevant CYP enzyme(s), wherein this prevents it from hydroxylating the methyl of R (Me) and S (Me).

[0228] (1F) can explain this model more. 6a, R (H), and 6b, S (H), cannot and can potently inhibit F₁F₀ ATP hydrolysis respectively [8, 109]. This figure shows that S (Me) and S (CH₂OH) are likely to be very structurally similar to S (H), and thence likely to also potently inhibit F₁F₀ ATP hydrolysis, and to exert anti-cancer activity. Crucially, R (Me) and R (CH₂OH) are not likely to be very structurally similar to R (H), nor each other, and in the case of R (CH₂OH) this enables it to potently inhibit F₁F₀ ATP hydrolysis and exert anti-cancer activity. So, in this (CH₂OH) case, and in the priming CH₃ on chiral carbon case, R over S stereochemistry can, in some embodiments, be favoured/desirable.

[0229] So, 8b has greater anti-cancer activity than 8a against some cancer cell lines. But 8a has greater anti-cancer activity than 8b against some other cancer cell lines. In some embodiments, an amount of 8b (preferably a therapeutically effective amount), and/or a salt, solvate, hydrate or prodrug thereof, is administered to treat a subject with [or suspected to have, or at risk of] cancer (or to treat a subject with a different disease/disorder/condition [including aging] mentioned herein, i.e. which can be treated with an F₁F₀ ATP hydrolysis inhibitor compound). In other embodiments, an amount of 8a (preferably a therapeutically effective amount), and/or a salt, solvate, hydrate or prodrug thereof, is administered to treat a subject with [or suspected to have, or at risk of] cancer (or to treat a subject with a different disease/disorder/condition [including aging] mentioned herein, i.e. which can be treated with an F₁F₀ ATP hydrolysis inhibitor compound). In alternative embodiments, an amount of a racemate or scalemate of 8a and 8b (preferably a therapeutically effective amount), and/or a salt, solvate, hydrate or prodrug thereof, is administered to treat a subject with [or suspected to have, or at risk of] cancer (or to treat a subject with a different disease/disorder/condition [including aging] mentioned herein, i.e. which can be treated with an F₁F₀ ATP hydrolysis inhibitor compound).

[0230] Methyl (instead of hydrogen or deuterium) upon the chiral carbon was expected to block racemization and increase the anti-cancer activity of the S stereoisomer, and decrease the anti-cancer activity of the R stereoisomer. But this added methyl confers a site for metabolism, wherein the R stereoisomer of this metabolized structure can adopt a very different structure than that adopted by 6a and 7a, wherein this structure can actually inhibit F₁F₀ ATP hydrolysis. So, with 6a and 6b, and 7a and 7b, a clean demarcation of anti-cancer activity, and lack thereof, with the S and R stereoisomers respectively, isn't observed because of racemization in a biological system. With methyl on the chiral carbon, 8a and 8b cannot racemize but this methyl confers a target for metabolization which changes the adopted structure of the R stereoisomer, such that it can actually inhibit F₁F₀ ATP hydrolysis. In some embodiments, the S and/or R stereoisomer with CH₂OH on its chiral carbon is administered, wherein administration of just/disproportionally the R stereoisomer thereof is preferred (R stereoisomer in enantiomeric excess). R stereoisomer with CH₂OH on its chiral carbon can be produced, for non-limiting example, by administering 8a to in vitro (preferably human, e.g. liver) microsomes (which are commercially available [e.g. from Sigma-Aldrich, St. Louis, MO, USA {which is a subsidiary of Merck KGaA}, or similar]; preferably afforded NADPH e.g. by addition of a NADPH-generating system; microsome assays of metabolic modification of a compound are well known in the art e.g. refer [110-111], the entirety of which are incorporated herein by reference, many similar papers in the literature findable by one of the art) and retrieving the metabolized structure with CH₂OH on its chiral carbon (optionally retrieving using Solid Phase Extraction {SPE} and preparative High Perfomance Liquid Chromatography {HPLC}, optionally confirming identity with mass spectrometry, e.g. searching for m/z 567.086 [M+H]⁺, optionally further confirming with ¹H NMR e.g. searching for the absence of the distinctive methyl signature, which is 3 hydrogens with the same (or very similar) chemical shift [ppm], optionally with further separation by one or more of distillation [leveraging differential vapor pressure], extraction [leveraging differential solubility], crystallization [leveraging differential level of saturation in a solvent], reaction with a resolving agent). A sample with enantiomeric excess (preferably >70%, and more preferably >97%, ee) of the R stereoisomer, with CH₂OH on its chiral carbon, will be termed 9a. A sample with enantiomeric excess (preferably >70%, and more preferably >97%, ee) of the S stereoisomer, with CH₂OH on its chiral carbon, will be termed 9b. In some embodiments, an amount of 9b (preferably a therapeutically effective amount), and/or a salt, solvate, hydrate or prodrug thereof, is administered to treat a subject with [or suspected to have, or at risk of] cancer (or to a treat subject with a different disease/disorder/condition [including aging] mentioned herein, i.e. which can be treated with an F₁F₀ ATP hydrolysis inhibitor compound); in other, more preferred, embodiments, an amount of 9a (preferably a therapeutically effective amount), and/or a salt, solvate, hydrate or prodrug thereof, is administered to treat a subject with [or suspected to have, or at risk of] cancer (or to treat a subject with a different disease/disorder/condition [including aging] mentioned herein, i.e. which can be treated with an F₁F₀ ATP hydrolysis inhibitor compound). In alternative embodiments, an amount of a racemate or scalemate of 9a and 9b (preferably a therapeutically effective amount), and/or a salt, solvate, hydrate or prodrug thereof, is administered to treat a subject with [or suspected to have, or at risk of] cancer (or to treat a subject with a different disease/disorder/condition [including aging] mentioned herein, i.e. which can be treated with an F₁F₀ ATP hydrolysis inhibitor compound).

[0231] The structure of 8a and 8b, but with trifluoromethyl (CF₃), instead of methyl (CH₃), on the chiral carbon is less susceptible to metabolism at this position, and it cannot racemize, and thence its stereoisomer preference for cancer therapy (and therapy for a different disease/disorder/condition [including aging] mentioned herein, i.e. which can be treated with an F₁F₀ ATP hydrolysis inhibitor compound) is less complicated and more defined, wherein its S stereoisomer is more favoured than its R stereoisomer. Its S stereoisomer adopts a similar structure than 6b, 7b and 8b. Its R stereoisomer adopts a similar structure to 8a (when it is unmetabolized, with CH₃ on its chiral carbon), which is actually quite structurally distinct from 6a or 7a, but which also doesn't have good inhibitory potency for F₁F₀ ATP hydrolysis.

[0232] FIG. 2: The anti-cancer activity of compounds 6a, 6b, 7a, 7b, 8a and 8b (shown in the figure) are all correlated, which suggests that they all exert anti-cancer activity by the same mechanism, inhibition of F₁F₀ ATP hydrolysis, and the bottom table shows their pairwise Pearson correlation (R) coefficients, all significant (p<0.05). In some disclosure embodiments, one or more of the compounds shown in this figure is in stereoisomeric excess such that it rotates polarized light in the levorotatory (L) direction, optionally wherein this compound(s) in stereoisomeric excess (L-rotating) is used to convey therapy in a subject, in a method of treatment of the human or animal body by therapy, optionally to treat/ameliorate/prevent/combat one or more diseases/disorders/conditions referred to in this disclosure, optionally cancer, optionally for the treatment/amelioration/prevention/combat of cancer in a subject(s), and/or for the manufacture of a medicament, optionally for treating one or more of the diseases/disorders/conditions referred to in this disclosure, optionally cancer. Without wishing to be bound by theory, the order of anti-cancer activity can be explained if the order of inhibitory potency against F₁F₀ ATP hydrolysis is: R (CH₂OH) >S (CH₂OH)≈S (Me) >S (D) >S (H) >R (Me) >R (H) >R (D). Explaining first that R (H) and S (H) cannot, and can, potently inhibit F₁F₀ ATP hydrolysis respectively [8, 109]. Starting from the bottom of the ranking: R (H) has greater anti-cancer activity than R (D) because a CH bond is weaker than a CD bond and so it has a greater chance of racemizing to S (D) or S (H). R (Me) has greater anti-cancer activity than R (H) because in some cases, over time, some/all of it is metabolized to R (CH₂OH), wherein R (Me) itself, unmetabolized, is at the bottom of the list (not shown), with worse inhibitory potency against F₁F₀ ATP hydrolysis than R (D), which has some chance of racemizing to S (D) or S (H). S (H) has greater anti-cancer activity than R (Me) because all of it is active rather than just some metabolized fraction, especially because some cancer cell lines have poor metabolism of R (Me). S (D) has greater anti-cancer activity than S (H) because a CD bond is stronger than a CH bond and so it has less chance of racemizing to R (D) or R (H). S (Me) and S (CH₂OH) have greater anti-cancer activity than S (D) and S (H) because they have no (but non-zero) chance of racemizing to R (H) or R (D). R (CH₂OH) has a structure very suited to inhibiting F₁F₀ ATP hydrolysis, very distinct from the structure of R (H), more akin to S (H), but better.

[0233] FIG. 3: FIG. 10 in Canadian application number 3,050,553 shows the anti-cancer activity of 8a and 8b in the NCI-60 five-dose in vitro assay 1107-1081. The present figure, herein, is a summary figure of that data (corresponding to FIG. 16K in the aforementioned Canadian application). Mean G150 for 8b and 8a is 3.09 and 2.85 μM respectively. So, 8a has the lower mean GI50 and so is the more potent. In the 8a case, this GI50 is lower/better than 65% of 102 FDA approved cancer drugs in [112]. A salt of 8a. e.g. 8a HCl, is likely to have an even lower G150 in NCI five-dose testing.

[0234] On average, 8b exerts greater anti-cancer activity than 8a in 1-dose (10 μM) NCI-60 testing (FIG. 1). On average, 8a exerts greater anti-cancer activity than 8b at 10 μM in 5-dose NCI-60 testing. So, the 1-dose and 5-dose results contradict. However, there hasn't been a mix up of 8a and 8b samples because in 1-dose (10 μM) testing, in FIGS. 1E and 1D, one can see that 8b exerts much greater activity against, for example, the MDA-MB-231/ATCC, OVCAR-5, HCC-2998 and NCI-H322M cell lines than 8a. In the 5-dose testing, although most GI50s are lower with 8a, the GI50 for these cancer cell lines is greater with 8a than 8b. So, this signature carries through.

[0235] In the present figure: in 1-dose (10 μM) NCI-60 testing, cancer growth inhibition (%) with 8b tends to be greater than with 8a, and 8b-8a is positive. By contrast, in 5-dose testing, GI50 tends to be lower for 8a than 8b, because 8a has the more potent anti-cancer activity, which makes G150(8b-8a) positive. The exceptions to this tend to be for cancer cell lines against which 8b exerts much greater anti-cancer activity than 8a in 1-dose NCI-60 testing, so wherein 8b-8a is large, and then in 5-dose testing, GI50 tends to be lower for 8b than 8a, which makes G150(8b-8a) negative. For these cancer cell lines, 8b has so much greater anti-cancer activity than 8a in 1-dose testing that despite the increased anti-cancer of 8a relative to 8b in 5-dose testing, it isn't sufficient to overtake that of 8b in these cases.

[0236] The Pearson correlation coefficient between 8a activity in 1-dose (10 μM) and at 10 μM in 5-dose NCI-60 testing: R=0.4544 p=0.00034. The Pearson correlation coefficient between 8b activity in 1-dose (10 μM) and at 10 μM in 5-dose NCI-60 testing: R=0.6156, p<0.00001. In 5-dose NCI-60 testing, at 10 μM, the anti-cancer activity of 8a and 8b is greater than at 10 μM in 1-dose NCI-60 testing. Mean % cancer growth inhibition at 10 μM in 1-dose testing: 8a (60.32%), 8b (76.51%); in 5-dose testing: 8a (102.97%), 8b (99.42%). Median % cancer growth inhibition at 10 μM in 1-dose testing: 8a (59.83%), 8b (76.99%); in 5-dose testing: 8a (95%), 8b (93%). A compound exerting greater anti-cancer activity at 10 ppm in 5-dose than 1-dose NCI-60 testing is typically what is observed for compounds in the DTP database 11131. So, this isn't unexpected. Not wishing to be bound by theory, in 5-dose NCI-60 testing, why 8a has a lower mean GI50 than 8b will now be explained. 8a does exert greater anti-cancer activity than 8b against some cancer cell lines in 1-dose (10 μM) NCI-60 testing (FIGS. 1D and 1E). As explained in the legend of FIG. 1, because it can be metabolized to a form (hydroxylated on the chiral carbon) with greater anti-cancer activity than 8b. In 5-dose NCI-60 testing, whatever the reason(s) that compounds tend to exert greater anti-cancer activity at 10 μM in 5-dose than 1-dose NCI-60 testing, perhaps (to speculate) relating to greater compound availability because better care/optimization is taken over compound solubilizing, means there is more 8a, so more 8a being metabolized to the more active form (increased substrate, increased reaction rate and product), and this tips 8a into exerting greater anti-cancer activity at 10 μM than 8b. Except for the cancer cell lines that 8b exerted much more activity than 8a at in 1-dose testing, wherein the increased activity of 8a can't completely make up the deficit and overtake the activity of 8b.

### If1 Protein Activity is a Molecular Determinant of Lifespan

[0237] FIG. 4: Data teaching that IF1 protein activity is a molecular determinant of lifespan, therein explaining why different species have different maximal lifespans.

[0238] How can a dog be younger chronologically, but older biologically, than its human owner?Why do dogs age faster than humans? Why do different species age at different rates and have different maximal lifespans? This disclosure answers these questions. Presenting data in this figure that shows that IF1 protein activity is a molecular determinant of lifespan, therein explaining why different species have different maximal lifespans.

[0239] Smaller species tend to have shorter lifespans than larger species. Indeed, as observed in the figure, smaller species have a greater metabolic rate per unit mass, faster heartbeat and shorter lifespan than larger species. So, it seems that smaller species live fast, die young. Whilst larger species live slower for longer. Herein I disclose a reason/mechanism for this and how to manipulate it.

[0240] Figure: data in upper two figure panels is from [114], data in lower two panels is from the AnAge database [115]. Interpretation here is novel. There was some margin for error in marrying these two data sets because [114] uses imprecise terms such as sheep, hamster etc. wherein there are a number of different species in [115] that can fall into these categories. But a common sense alignment was applied in each case, by estimating which species [114] likely had easiest access to, so most likely used, and so most likely refer to. So, the 12 species that the present figure refers to are: cow (domestic cattle, Bos taurus), mouse (house mouse, Mus musculus), rat (Rattus rattus), hamster (golden hamster, Mesocricetus auratus), guinea pig (Cavia porcellus), pigeon (common wood-pigeon, Columba palumbus), chicken (red junglefowl, Gallus gallus), rabbit (European rabbit, Oryctolagus cuniculus), sheep (domestic sheep, Ovis aries), pig (wild boar, Sus scrofa), dog (Canis familiaris) and human (Homo sapiens). All warm blooded. Specific metabolic rate data wasn't available in [115] for all these species, thence the smaller number of data points in the 3^{rd} figure panel. The maximum longevity of human from [115] (122.5 years) isn't shown in the figure because arguably this value isn't fairly comparable to the others shown, because modern medicine is disproportionally applied to humans and the verifiable longevity data set for humans is much, much bigger with so many countries recording births and deaths (the bigger the data set the greater the chance a higher maximum longevity will be found). Human could perhaps be more comparably incorporated by using a maximum longevity record from a small human data set, to mirror the small data sets for the other species, wherein this data set comes from humans living in the past e.g. from 1881 Germany where life expectancy of men and women was 35.6 and 38.5 years respectively (Statistisches Bundesamt Deutschland, www.destatis.de). However, omission was chosen instead. For domestic cattle (mass=500 kg), maximum longevity of 20 years is used in my figure, which is from [115], but [115] do caution that this value is of “questionable” quality and say in this entry's “observations” section that the real value is likely to be higher, which if applied, would make the positive trend shown here, between body mass and lifespan, stronger.

[0241] The 1^{st} figure panel shows a negative correlation between species size and mass specific F₁F₀ ATP hydrolysis during ischemia. The 3^{rd} figure panel shows a negative correlation between species size and mass specific metabolic rate. The 2^{nd} figure panel shows a negative correlation between species size and heart rate, wherein bpm refers to beats per minute. The 4^{th} figure panel shows a positive correlation between species size and maximum longevity (maximal recorded lifespan). Herein disclosed, the 1^{st} panel correlation drives the 3^{rd} panel correlation which drives the 2^{nd} panel correlation which drives the 4^{th} panel correlation.

[0242] The following table presents the Pearson correlation (R) coefficients, with associated p-values (one-tailed) below, for the different relationships:

| Pearson R correlation Coefficient | Heart rate | Specific metabolic rate | Maximal longevity |
|---|---|---|---|
| Specific ATPase during ischemia | 0.8007 | 0.5331 | −0.7194 |
| | Heart rate | 0.9034 | −0.8567 |
| | | Specific metabolic rate | −0.7472 |
| P-value (one-tailed) | Heart rate | Specific metabolic rate | Maximal longevity |
| Specific ATPase during ischemia | 0.0008765 | 0.0697165 | 0.0062885 |
| | Heart rate | 0.000419 | 0.0003785 |
| | | Specific metabolic rate | 0.0165595 |

Asymptotically exact harmonic mean p-value for combining independent/dependent tests
Of all the p-values above = 0.0009447668 = 0.0009
Fisher's combined probability test
Using p-values for [Specific ATPase during ischemia vs. Maximal longevity] (=0.0062885) &
[Heart rate vs. Specific metabolic rate] (=0.000419) = 0.000036

[0243] The p-values are small, despite the small values of n (wherein Specific metabolic rate has an especially small n value, because I only had such data for 9 of the 12 species), in testament to the high R values. The asymptotically exact harmonic mean p-value was calculated according to the method of [116] (its corrected method according to: “Correction for Wilson, The harmonic mean p-value for combining dependent tests—Oct. 7, 2019”). This value is significant using either the p-value<0.05, or the more stringent <0.01, cut-off of the art. Its value indicates that there is a 0.09% probability that the observed (or more significant) correlations could have occurred by random sampling error (i.e. the sample doesn't fairly reflect the population) if the null hypothesis is true. Note that one-tailed p-values were used because the alternative hypothesis is directional (and thence the null hypothesis encompasses the anti-directional correlations and non-correlations) i.e. it doesn't merely hypothesize a correlation in either direction for each, but a correlation in a specific direction (+ or −) for each.

[0244] IF1 protein inhibits F₁F₀ ATP hydrolysis. IF1 protein inhibits F₁F₀ ATP hydrolysis more during ischemia but its inhibition of F₁F₀ ATP hydrolysis is non-zero under normal conditions. Larger species inhibit specific F₁F₀ ATP hydrolysis more than smaller species during ischemia (1^{st} figure panel). This is because larger species have greater IF1 protein abundance, indeed a greater IF1/F₁ protein ratio, and/or because their IF1 protein has greater inhibitory potency against F₁F₀ ATP hydrolysis [114, 115, 117-127]. Thence there is a positive correlation between species size and their capability to inhibit their F₁F₀ ATP hydrolysis i.e. the bigger the species, the less F₁F₀ ATP hydrolysis.

[0245] Animal mass is proportional to animal radius³, animal surface area is proportional to animal radius² [128]. So, smaller animals have a larger surface area to mass ratio and so lose a greater proportion of their heat to the environment and so need to generate more heat per unit mass than larger animals, which they do by a greater metabolic rate per unit mass, which they achieve by greater specific F₁F₀ ATP hydrolysis, which consumes more ATP per unit mass/time, which requires more ATP be created per unit mass/time, and thence a greater metabolic rate, thence a greater specific heat production. So, smaller species have greater specific F₁F₀ ATP hydrolysis capacity than larger species (1^{st} figure panel). That F₁F₀ ATP hydrolysis is used for heat production by animals is shown by greater F₁F₀ ATP hydrolysis capability, because of greater F₁F₀ ATP synthase and lesser IF1 protein abundance, in mitochondria sourced from cows in winter than summer, wherein such seasonal changes don't occur in laboratory rats kept at constant temperature [117]. Furthermore, specifically inhibiting F₁F₀ ATP hydrolysis in mice reduces their heat generation and body temperature. Because smaller species have a higher specific metabolic rate than larger animals, more fuel/waste is needed/ejected per unit mass per unit time, and they require and have a faster heart rate (2^{nd} figure panel). Smaller species have a greater specific metabolic rate (3_{rd} panel), faster heart rate (2^{nd} panel) and lower lifespan (4^{th} panel), wherein I innovatively suggest this is a function of their greater F₁F₀ ATP hydrolysis capacity (1^{st} panel) as a function of their lesser IF1 protein inhibitory capacity. And thence increasing the abundance of IF1 protein in a species, and/or expressing/administering the IF1 protein amino acid sequence of a larger and/or longer living species, increases the lifespan of a species, F exogenous heat (and/or greater body insulation) substitutes for the lower endogenous heat production that will ensue. Similarly, a specific/preferential drug inhibitor(s) of F₁F₀ ATP hydrolysis, for non-limiting example a compound(s) of Formula (I) herein, increases the lifespan of a subject, IF exogenous heat (and/or greater body insulation) substitutes for the lower endogenous heat production that will ensue. A disclosure embodiment is a method of administering a specific or preferential inhibitor(s) of F₁F₀ ATP hydrolysis, for non-limiting example a compound(s) of Formula (I-V, VII-VIII) herein, to a subject to extend their health and/or lifespan. A disclosure embodiment is a method of increasing the amount of IF1 protein in a subject to extend their health and/or lifespan. A disclosure embodiment is a method of administering a subject one or more of an IF1 protein, which has a greater inhibitory potency against F₁F₀ ATP hydrolysis than their endogenous IF1 protein, especially at pH 8, to extend their health and/or lifespan, optionally wherein one or more of a gene or polynucleotide or DNA or RNA is administered that is translated into such an IF1 protein. A disclosure embodiment is to express/administer the IF1 protein of a larger species in a smaller species to increase the health and/or lifespan of the smaller species. A disclosure embodiment is to express/administer the IF1 protein of a longer living species in a shorter living species to increase the health and/or lifespan of the latter.

[0246] So this data teaches that IF1 protein activity is a molecular determinant of lifespan, therein explaining why different species have different maximal lifespans, teaching selective F₁F₀ ATP hydrolysis inhibitors (e.g. cell-penetrating IF1 fusion proteins and functional fragments, and variants/derivatives, thereof) to extend health- and life-span. IF, when the subject has an effective amount of an exogenous/administered F₁F₀ ATP hydrolysis inhibitor compound(s) in their system, exogenous heat/temperature to the subject (and/or their body insulation e.g. by clothing) substitutes for their lower endogenous heat production, optionally wherein the administration pattern selected is such that the subject only has an effective amount of a F₁F₀ ATP hydrolysis inhibitor drug(s) in their system some of the time, e.g. when they are trying to sleep/sleeping, optionally which they do at a safe elevated/heated temperature (to their geographical location's ambient temperature at that time). An administered F₁F₀ ATP hydrolysis inhibitor drug(s) increases the thermoneutral temperature of the subject, and/or the temperature at which they feel comfortable, which can actually assist the subject, in and of itself, in a hot country, and which can be countered in a cold country by wearing more clothing and/or increasing room temperature (e.g. that in which the subject sleeps/relaxes/works/travels). When the ambient temperature to the subject is 37° C. or greater, the subject needn't endogenously generate any heat to keep their body temperature at 37° C., indeed any endogenously generated heat is then acting to move the body temperature away from the optimum temperature, and so is a curse and not a benefit. The thermoneutral/thermocomfortable temperature for a human, wearing clothes, tends to be in the range of 18 to 22° C. It requires costly air conditioning in many parts of the world, at least during summer, to set a room temperature to within this range. So, in these parts, at least during summer, there is dual benefit in using a F₁F₀ ATP hydrolysis inhibitor drug(s) to increase a human's theremoneutral/thermocomforable temperature, wherein the amount of shift is set by the dose administered, wherein there is a dual thermoregulatory and an anti-aging benefit. So, in colder climates the thermoregulatory aspect can be considered a bug that needs to be offset, but in hotter climates, the thermoregulatory aspect can be considered a feature, which actually confers benefit in and of itself: stand-alone benefit, conferring slower aging atop.

[0247] Incidentally, the newly discovered physiology of homeothermy, disclosed herein, is a very elegant system: when the body is resting and so isn't performing much work, F₁F₀ ATP hydrolysis (and its drive to F₁F₀ ATP synthesis and metabolic rate) confers endogenous heat production. But when the body is active and performing appreciable work, ATP is consumed to do this work (inherently generating heat as a by-product, 2^{nd} Law of Thermodynamics), and so there is less ATP available to F₁F₀ ATP hydrolysis, which is reduced as a result. So when performing work, which inherently generates heat, the futile (no work) process to generate heat is decreased, affording more energy to actually perform work, and reducing the chance that the body will overheat. So, in the resting state, heat generation is (fractionally) by a futile process, until more work is required, after which the heat generation by the actual performing of work substitutes for a reduction in heat generation by the futile process. Elegant. When an effective amount of a compound(s) of this disclosure, for example at least one compound of at least one of Formula (I), (II), (III), (IV), (V), (VII), (VIII), [X], and/or another compound(s) that selectively inhibits F₁F₀ ATP hydrolysis, and/or a pharmaceutically-acceptable salt, solvate, hydrate or prodrug thereof, and/or a pharmaceutical composition(s)/medicament(s)/supplement(s) thereof, is administered (and/or self-administered) to a subject whilst/before they are performing work, it reduces the amount of F₁F₀ ATP hydrolysis further, increasing the amount of ATP energy available to perform work, increasing physical and/or mental performance/endurance, wherein the additional ATP consumed for more work inherently generates more heat, which (partially/completely) substitutes for the further decrease in heat generation by F₁F₀ ATP hydrolysis.

[0248] When not performing ADP/ATP exchange across the mitochondrial inner membrane, the Adenine Nucleotide Translocator (ANT) can passage protons [129]. When the body is at rest, not enough cellular work is performed to generate the required heat as a by-product, and so heat needs to be produced by a futile (no work performed) process. Wherein at rest there is less ADP/ATP exchange by ANT (because of less cellular demand for ATP), and so ANT is more available to passage protons, and participate in a futile cycle with F₁F₀ ATP hydrolysis pumping protons into the mitochondrial intermembrane space, ANT (and/or other members of the SLC25 Mitochondrial Carrier Family) passing protons back into the mitochondrial matrix, and this ATP consumption pulling through more ATP synthesis by oxidative phosphorylation, all acting to generate sufficient heat to keep the body warm at rest. Wherein more heat needs to be generated per unit mass in smaller than larger animals because they have a larger surface-area (A) to volume (V) ratio, because in Euclidean geometry, A∝cr² and V∝r³ where r is radius, and so they tend to have a greater metabolic rate and so accumulate “miles on the clock” (age) faster. The amount of this futile process is controlled by IF1 protein activity, which curtails it, wherein smaller, shorter-living species tend to have less IF1 protein activity, as shown in the present figure.

Reducing F₁F₀ Hydrolysis Reduces Body Temperature

[0249] The data of FIG. 4 herein makes a prediction: administration of a compound that can inhibit/reduce F₁F₀ hydrolysis (thence reduce futile cycling of ATP synthesis and hydrolysis and its heat generation), e.g. compound 6b, to a subject will reduce their body temperature, if the ambient temperature is below their body temperature. FIG. 15 in PCT/EP2018/069175 (and FIG. 23 in Canadian application number 3,050,553) shows that compound 6b, when administered to a mouse, reduces its rectal temperature towards the ambient room temperature (22° C.), in a dose dependent manner, wherein a larger dose can result in a greater rectal temperature drop, wherein this rectal temperature drop conferred sedation/hypoactivity in the mice. The figure teaches that if Body Temperature (BT) is greater than Ambient Temperature (AT), compound 6b reduces BT to be closer to AT, but it canNOT reduce BT below AT; compound 6b can reduce BT to more nearly above AT (BT≈AT), but not completely reducing to BT=AT because there are other aspects to metabolic heat production than F₁F₀ ATP hydrolysis, which compound 6b does not reduce, and so BT remains higher than AT (BT≈AT<BT), unless the animal dies, in which case BT=AT. If AT is at or above optimal body temperature, upon compound 6b administration, BT will remain at this optimum because compound 6b canNOT reduce BT below AT. In some disclosure embodiments, when the subject has a compound(s) of this disclosure in its system, for example a compound(s) of Formula (I), the subject is kept in an ambient temperature at or near 37° C. i.e. at or near the optimal body temperature of a mammal. This ensures that the subject's body temperature cannot fall below this optimal body temperature. This renders a compound(s) of this disclosure safer and tolerable at higher dose, which can enable the compound(s) to safely convey greater therapeutic utility e.g. greater anti-cancer activity. To illustrate by analogous example, anaesthetic can dramatically reduce subject body temperature, but not when the body is kept at 37° C. ambient temperature [30]. An ambient temperature equal to optimal body temperature can keep body temperature at its optimum when a compound(s) that reduces body heat generation and/or increases body heat dissipation is administered to the subject.

[0250] FIG. 5: This is a diagram relating to mouse and does NOT present real data, although it is inspired by experimental data in [6]. When ambient equals thermoneutral temperature, which is ˜32° C. normally for a mouse [6], the mouse's basal heat production (heat production of the basal metabolic rate) is sufficient to maintain body temperature at ˜37° C. At lower ambient temperatures than this, greater metabolic rate/heat production (thermogenesis) is required, and at higher ambient temperatures than this, greater metabolic rate is required for cooling, all to maintain body temperature at ˜37° C. A specific F₁F₀ ATP hydrolysis inhibitor, e.g. compound 6b, reduces the mouse's basal metabolic rate and shifts its thermoneutral temperature higher, illustratively to 35° C. in this figure, which makes the mouse more comfortable (lower metabolic rate) at higher ambient temperatures. Furthermore, this figure anticipates that F₁F₀ ATP hydrolysis is integral to thermogenic metabolic rate, in addition to basal metabolic rate, and so the gradient of the thermogenic metabolic rate increase is shallower, because of reduced F₁F₀ ATP hydrolysis, and thus the mouse is unable to maintain 37° C. body temperature at lower ambient temperatures than its thermoneutral temperature. The metabolic rate at thermoneutral temperature=35° C. was selected by drawing a line from metabolic rate at thermoneutral temperature=32° C., =10 W/Kg, which is an experimental data point from classic Herrington albino mouse study described in [6], to 37° C. on the x-axis (thermoneutral temperature=37° C., metabolic rate=0 W/kg) and selecting the corresponding metabolic rate for 35° C. on this line. Accordingly the basal metabolic rate was 60% lower and, in accordance, the gradient of the thermogenic plot was reduced by 60% also, anticipating that F₁F₀ ATP hydrolysis contributes equally to basal and thermogenic metabolic rates, although it probably contributes more to the thermogenic than basal metabolic rate, in which case the ascending thermogenic metabolic gradient can be shallower, and the descending body temperature gradient steeper, than shown (although it cannot outpace the gradient of ambient temperature decline: the mouse body temperature must be higher or at {if metabolism=0 W/kg} ambient temperature). Conclusion: mice administered with 6b compound cannot survive at as low temperatures than vehicle treated mice. However, if kept at higher temperatures, at or safely greater than their thermoneutral temperature, the lower metabolic rate of 6b administered mice confers them longer lifespan. When the connection between work (unit: joule) and time is disrupted, the simple correlation between age and time is broken. Oxidative metabolism produces damaging/aging Reactive Oxygen Species (ROS) and a lower oxidative metabolic rate produces less ROS per unit time, reducing the damage/aging rate, extending lifespan. An older (in time) 6b administered body can be younger (in aging/damage) than a younger (in time) vehicle administered body. Like a car, the less miles per unit time it drives, the longer it lasts, like a body metabolism, the less oxidative work (joules) it performs per unit time, the longer it lasts (P.S. health benefit of exercise doesn't breach this: exercise provokes adaptive changes that means the body works less at rest, e.g. endurance athletes have lower resting heart rate, =net reduction in work performed by body).

[0251] FIG. 6: In vivo, inhibiting F₁F₀ ATP hydrolysis safely reduces the rate of oxidative phosphorylation and ROS generation {and thence the rate of aging}. Shown in forebrain neurons. This figure presents re-interpreted data from [130].

[0252] [130] is an illustrative example of how an IF1 gene copy, or a mutant thereof, from the same or different species, can be transferred into an organism in order to increase its IF1 protein expression. This example shows it is safe in mouse brain (more specifically neurons in forebrain) to increase IF1 protein content by three times (300%), wherein the delta increase in [130] occurs with a mutant human IF1 protein form with increased inhibitory potency against F₁F₀ ATP hydrolysis at pH 8, which is observed to reduce F₁F₀ ATP hydrolysis capability by ˜35%, which demonstrates the safety of inhibiting F₁F₀ ATP hydrolysis in vivo, at least specifically in forebrain neurons (mice were “normal in appearance, home-cage behaviour, reproduction, and longevity up to 1-year follow-up”).

[0253] The relevance of the following will become apparent later, wherein my analysis shows that MitoSOX™, an ROS (superoxide) reporting fluorogenic dye, accumulates more in the mitochondrial matrix than Tetramethylrhodamine Methyl Ester Perchlorate (TMRM), a fluorescent dye used to report Ψ_{IM}:

```
Basic pKa (MACRO, static, T = 310K) computationally predicted from
structure using MarvinSketch (ChemAxon)

[chemical structure]

Double positively charged
@pH 6.8 = 0.04%; @PH 8 = 0%.
[matrix] = (99.96*10\hat{ }(−140/−61.5)) +
(0.04*10\hat{ }(−140/−46.1)) = 18,934

[chemical structure]

Double positively charged
@pH 6.8 = 1.03%; @pH 8 = 0.07%.
[matrix] = (98.97*10\hat{ }(−140/−61.5) +
(0.96*10\hat{ }(−140/−46.1)) +
(0.07*10\hat{ }(-140/-30.7)) = 22,292
Disparity between TMRM and MitoSOX
accumulation in matrix increases with ψ_{IM}
Ratio = 22,292/18,934 = 1.18 (ψ_{IM} = −140 mV)
                    = 1.34 (ψ_{IM} = −160 mV)
                    = 1.68 (ψ_{IM} = −180 mV)
                    = 2.38 (ψ_{IM} = −200 mV)
$Nernst equation : [ matrix ] = [ IMS ] \cdot {10}^{( \frac{{Ψ}_{IM}}{- G} )}$
G = 1000*2.3026*(RT/zF);
where 1000 is a dimensionality factor to work in mV,
R = gas constant (8.31 J · mol⁻¹), T = temperature (K), z = species charge,
F = Faraday constant (96,485 C · mol⁻¹). G = 61.5 (cation), 30.7
(di-cation),
−61.5 (anion), −30.7 (di-anion) at T = 310K = 37° C.
Use G = (61.5 + 30.7)/2 = 46.1 for a species that is +2 on one side,
and +1 on other side, of membrane.
matrix = mitochondrial matrix, IMS = mitochondrial intermembrane
space, IM = mitochondrial inner membrane,
ψ_{IM} = voltage across IM = −140 mV, pH of IMS = 6.8 (but might be as
low as 6), pH of matrix = 8.
```

[0254] (FIG. 6A) Experiments with mitochondria extracted from the brain of wild-type mice (wt) and double transgenic mice (H+/T+) with: (i) a mutant human IF1 protein gene (with a H49K substitution, i.e. with a histidine [H] in its “pH dependence motif” {FIG. 10}substituted with lysine [K]) under a tetracycline-responsive promoter element (TRE), and (ii) a tetracycline-controlled transactivator protein gene (tTA) under the control of the CaMKIIα promoter, wherein CaMKIIα is only expressed in forebrain neurons [131], thence tTA and thence the human H49K IF1 protein gene is only expressed in the mouse's forebrain neurons (in the absence of a tetracycline(s) e.g. doxycycline), wherein their IF1 protein amount (native+mutant) is 3 times (i.e. 300%) greater than wild-type. The H49K substitution renders an IF1 protein with greater inhibitory potency against F₁F₀ ATP hydrolysis at normal mitochondrial matrix pH (8). F₁F₀ ATP hydrolysis is 35% less in brain mitochondria isolated from H+/T+ than wild-type mice. The reduction in F₁F₀ ATP hydrolysis doesn't match the increase in IF1 protein. Perhaps because an IF1 protein fraction is inactivated by phosphorylation on its “phosphorylation control switch” serine residue (FIG. 10). Wherein in some disclosure embodiments, IF1 protein is used with this serine substituted for another residue, optionally alanine, so that it cannot be phosphorylated at this position and thence cannot thereby be inactivated; and in further embodiments, this IF1 protein also has a H49K substitution. H+/T+ mice have a lower respiration (O₂ consumption, including oligomycin sensitive O₂ consumption) rate than wild-type, during State 4 (substrate [e.g. glucose, malate] stimulated) and State 3 (+ADP stimulated) respiration. Probably as a function of their lower respiration rate, H+/T+ mice have a more hyperpolarized membrane potential across their mitochondrial inner membrane, Ψₘ (also referred to as Ψ_{IM} herein), because not so much of their proton motive force (pmf) is being eroded per unit time to drive ATP synthesis. However, upon FCCP/antimycin A administration, H+/T+ mice have a more depolarized Ψ_{IM} than wild-type because the response to an uncoupler/respiratory chain inhibitor involves global reversal of ATP synthase and F₁F₀ ATP hydrolysis to pump protons, partially maintaining Ψ_{IM}, wherein F₁F₀ ATP hydrolysis capability is partially compromised in H+/T+ mice.

[0255] (FIG. 6B) Experiments with cortical neurons in culture, after being cultured for 9-10 days, after being extracted from mouse embryos. The 1^{st} and 2^{nd} panel shows disparity in Ψ_{IM} between H+/T+ and wild-type (CRL) mice again. As in FIG. 6A. But this time in cultured cortical neurons from the mice (embryos), wherein the mitochondria of H+/T+ mice have a more hyperpolarized Ψ_{IM} (accumulate more TMRM⁺) than wild-type. But, as in FIG. 6A, have a more depolarized Ψ_{IM} upon FCCP/respiratory chain inhibitor (antimycin A/rotenone) administration. A typical value for Ψ_{IM} in normal mitochondria is −140 mV and if we equate the 5 a.u. value for wild-type in the 2^{nd} panel with −140 mV, then the 6 a.u. value of H+/T+here in the 2^{nd} panel is −168 mV. This Ψ_{IM} disparity means that H+/T+ mitochondria accumulates more MitoSOX ROS (superoxide) reporting compound in their mitochondrial matrix, wherein this disparity can be calculated using the equation presented earlier, and this disparity is shown here, in the 3^{rd} panel. With this MitoSOX accumulation disparity, one would expect a greater MitoSOX signal from H+/T+ mitochondria, to wild-type mitochondria, in the proportion shown in the 3^{rd} panel. But what is actually experimentally observed is in the 4^{th} panel. Thence H+/T+ mitochondria must produce 66% less ROS (superoxide) than wild-type, which fits with their lower oxidative respiration rate observed in (FIG. 6A). Thus, given that ROS are the drive to aging [132, 133], H+/T+ cells have a slower aging rate than wild-type. Indeed, the reduced ROS in the forebrain neurons of H+/T+ mice is likely underestimated by this in vitro cultured neuron assay. H+/T+ neurons have less O₂ consumption, as shown in (FIG. 6A), and so in neuron culture, because of this lesser O₂ consumption, H+/T+ neurons experience greater pO₂ near their respiratory chain, which favours increased [ROS], wherein this is an experimental artefact because in vivo reduced O₂ consumption doesn't increase pO₂, because breathing (rate, depth etc.) maintains tissue pO₂ within a narrow range.

[0256] [130] interpret the lesser O₂ consumption of H+/T+ mitochondria as evidence that IF1 protein directly inhibits F₁F₀ ATP synthesis (which suggests no clinical utility because F₁F₀ ATP synthesis is essential to aerobic life). This is incorrect. As elucidated by the work of this disclosure, substantial F₁F₀ ATP hydrolysis is occurring under normal conditions in mice, which sets OXPHOS at high rate, to generate heat. Increased [IF1 protein] inhibits F₁F₀ ATP hydrolysis more, and so less ATP needs to be made by F₁F₀ ATP synthesis, thence less OXPHOS is required, less O₂ is consumed (when F₁F₀ ATP hydrolysis capability is reduced by ˜35% there is ˜60% less O₂ consumption during State 3 respiration), thus less ROS are generated per unit time, thence aging is slower: ˜60% slower during State 3 respiration, by the teaching of this disclosure, reinterpreting data of 11301. Less heat is produced, but because in this case this effect is limited to neurons of the forebrain, heat transfer from other mouse body regions, and from astrocytes in the forebrain (which don't express CaMKIIα, so don't express tTA, so don't express the transgenic IF1 gene), maintains an appropriate temperature in forebrain neurons. By the teaching of this disclosure, the H+/T+ mice are disclosed to have slower aging in forebrain neurons, wherein they have reduced [susceptibility to/progression of] brain diseases of aging e.g. neurodegenerative diseases like Alzheimer's disease, dementia, Parkinson's disease etc., and less cognitive decline with aging (e.g. as assayed by one or more of the mouse behavioural assays disclosed elsewhere herein, or another “brainspan”/cognitive assay known to one of the art). This feature can be stopped by administering tetracycline/doxycycline to these mice, which blocks IF1 transgene expression in their forebrain neurons. By contrast to the present disclosure, [130] claim that this mutant IF1 gene introduction increases ROS and oxidative stress in mouse forebrain neurons. Given the linkage between oxidative stress and the development/progression of neurodegenerative diseases [24], [130] teaches that these transgenic mice have increased susceptibility to/progression of neurodegenerative disease(s) than wild-type mice.

[0257] To briefly discuss some of the data in [130], that isn't replicated in this figure, but that is also re-interpreted herein. The protein carbonylation assay that [130] uses can be unreliable (“numerous problems with data reproducibility or production of spurious results” [134]) and/or, furthermore is corrupted by the large difference in [tubulin] between the H+/T+ and wild-type mice (refer the western blots; [tubulin] is used as a denominator in their carbonylation calculation). Brain of H+/T+ mice has less [ATP], but less [ADP] also, and so the ATP/ADP ratio isn't changed. There is greater [AMP]. These H+/T+ mice have less ATP and ADP because they have less cycling of F₁F₀ ATP synthesis (ATP generation) and F₁F₀ ATP hydrolysis (ADP generation), so a greater proportion of their nucleotide exists as AMP. This, greater [AMP], activates the AMP-activated protein kinase (AMPK; more phosphorylated active AMPK is observed [130]), which upregulates glycolysis, wherein the extra NADH it produces isn't very thermodynamically inclined to enter an electron into the respiratory chain because of the hyperpolarised Ψ_{IM} (no “sink drive”), which comes from a reduced rate of [pmf erosion (F₁F₀ ATP synthesis) to lesser pmf creation (F₁F₀ ATP hydrolysis) to generate heat]. More thermodynamically favourable is for lactate dehydrogenase to use this extra NADH, switching pyruvate to lactate, which is then exported, exporting this chemical energy to be accepted by a cell more in need of energy, elsewhere in the subject.

[0258] FIG. 7: In vivo, inhibiting F₁F₀ ATP hydrolysis safely reduces the rate of oxidative phosphorylation {and thence ROS generation {by extrapolation from data of FIG. 6}, and thence the rate of aging}. Shown in liver cells (hepatocytes). This figure presents re-interpreted data from [135].

[0259] [135] is an illustrative example of how an IF1 gene copy, or a mutant thereof, from the same or different species, can be safely transferred into an organism in order to increase its IF1 protein expression. Shown in this figure is data from experiments with mitochondria extracted from the brain of wild-type mice (CRL) and double transgenic mice (H/T) with: (i) a mutant human IF1 protein gene (with a H49K substitution, i.e. with a histidine [H] in its “pH dependence motif” {FIG. 10} substituted with lysine [K]) under a tetracycline-responsive promoter element (TRE), and (ii) a tetracycline-controlled transactivator protein gene (tTA) under the control of the rat liver-enriched activator protein (LAP; member of Cebpb gene family) promoter, wherein LAP is only expressed in liver cells, thence tTA and thence the human H49K IF1 protein gene is only expressed in the mouse's liver cells (in the absence of a tetracycline(s) e.g. doxycycline). In perivenous hepatocytes especially. These are “Tet-off” mice, expressing the transgenic IF1 protein gene (h-IF1) in the absence of a tetracycline e.g. doxycycline (Dox), as shown in the 1^{st} panel, wherein the 2^{nd} panel shows the presence of h-IF1 in the mouse liver cells using an antibody specific for human over mouse IF1 protein, wherein this added IF1 protein inhibits the F₁F₀ ATP hydrolysis capability by 25% (3^{rd} panel) and decreases State 3 respiration rate by 37%. Alternative transgenic mice were also generated, “Tet-on” mice, which have rtTA instead of tTA under the control of the LAP promoter, which only express the IF1 transgene in the presence of a tetracycline e.g. doxycycline (Dox), wherein this added IF1 protein inhibits the F₁F₀ ATP hydrolysis capability by 40% (3^{rd} panel) and decreases State 3 respiration rate by 44%. These experiments demonstrate the safety of inhibiting F₁F₀ ATP hydrolysis in vivo, at least specifically in liver (these transgenic IF1 mice had “no differences in weight, life span and cage behavior when compared to controls after one year of follow up”).

[0260] FIG. 8: In vivo, inhibiting F₁F₀ ATP hydrolysis safely reduces the rate of oxidative phosphorylation (and thence ROS generation {by extrapolation from data of FIG. 61, and thence the rate of aging}. Shown in intestine. This figure presents re-interpreted data from [136].

[0261] [136] is an illustrative example of how an IF1 gene copy, from the same or different species, can be safely transferred into an organism in order to increase its IF1 protein expression. Shown in this figure is data from mitochondria extracted from the colon of wild-type mice (CL), and double transgenic mice (I/T; “Tet-on”) with (i) a Non-mutant human IF1 protein gene under a tetracycline-responsive promoter element (TRE), and (ii) the intestine-specific Villin-rtTA2-M2 transactivator, wherein the human IF1 protein gene is only expressed in the mouse's intestine cells (in the presence of a tetracycline(s) e.g. doxycycline). This extra (human) IF1 protein inhibits the F₁F₀ ATP hydrolysis capability by 35% and decreases oligomycin sensitive respiration rate by 60%. This experiment demonstrates the safety of inhibiting F₁F₀ ATP hydrolysis in vivo, at least specifically in intestine.

[0262] FIG. 9: Diagram (not real data) illustrating how reducing [ROS] in a cell, for example by inhibiting F₁F₀ ATP hydrolysis which reduces the oxidative phosphorylation/ROS generation rate, can prolong/increase the information fidelity of genomic/mitochondrial DNA, which slows/reverses aging. ROS=Reactive Oxygen Species. The terms in the Michaelis-Menten equation are extremely well known to those of the art. FIG. 6 shows the mechanism, (inhibiting F₁F₀ ATP hydrolysis which reduces the oxidative phosphorylation rate) and safety of reducing ROS in vivo. FIGS. 7 and 8 provide further proof of mechanism and safety. FIG. 4 elucidates that a different rate of F₁F₀ ATP hydrolysis is why different species have different maximal lifespans. Any compound(s) administered and/or method(s) that reduces/inhibits F₁F₀ ATP hydrolysis to slow/reverse aging, and/or extend lifespan/healthspan, in a subject is componentry to this disclosure, optionally wherein the expression/amount/activity of one or more DNA repair enzymes is increased in the subject also. For (non-limiting) example, any such use of a compound(s) of Formula I-V and/or VII-VIII, or a pharmaceutically-acceptable salt, solvate, hydrate or prodrug thereof. In some embodiments, a compound(s) of this disclosure, a F₁F₀ ATP hydrolysis inhibitor(s), or a pharmaceutically-acceptable salt, solvate, hydrate or prodrug thereof, is taken/administered before/during sleep, optionally wherein the subject sleeps in a temperature controlled/heated atmosphere, and/or where the subject is heated by radiative heating, optionally wherein exogenous heat substitutes for lower endogenous heat production by the subject (lower because of a compound(s) of this disclosure in their system), and wherein lesser ROS production results, thence less DNA damage per unit time, optionally wherein the rate of DNA repair thence exceeds the rate of DNA damage and so there is net DNA repair, wherein most DNA damage can still be recognised as damage (thence the possibility of being repaired) within a 24 hour period, which is a factor that permits the restorative action of sleep itself, which has a metabolism slowing/body temperature dropping (ROS reducing) component, which a compound(s) of this disclosure increases/improves. In this way, the subject doesn't need to live in a temperature controlled environment whilst awake, just when they are sleeping, and/or during some other time(s) of their choosing. In some embodiments the subject, with a compound(s) or a pharmaceutically-acceptable salt, solvate, hydrate or prodrug thereof in their system, wears heat generating/retaining clothing/device(s), optionally that monitors the subject's body temperature and adjusts its heat generating/retaining ability to maintain the subject's body at or near a desired body temperature (optionally at or near 37° C.).

[0263] In a disclosure embodiment, one or more administered F₁F₀ ATP hydrolysis inhibitors of this disclosure, or a pharmaceutically-acceptable salt, solvate, hydrate or prodrug thereof, reduces the ROS generation per unit time in a subject, which reduces their DNA damage/aging rate, such that it becomes lower than their DNA repair rate, and so their DNA (and other) repair mechanisms are under rather than overwhelmed, and their aging is stopped (repair matches damage rate) or reverses (greater repair than damage rate) so the subject becomes biologically younger, rather than older, in chronological time.

[0264] FIG. 10: Some sequence embodiments: SEQ ID NO:639 to SEQ ID NO:1425, wherein any fragment thereof (non-limiting e.g. if sequence has N-terminal Mitochondrial Import Sequence (MIS), in alternative sequence embodiments it is absent), and concatenated fragments thereof, are contemplated (as is use thereof, for at least one use disclosed herein). Presented amino acid sequences that are shorter than 4 amino acids long are not incorporated in the Sequence Listing of this application. SEQ ID NO:130, SEQ ID NO:131, SEQ ID NO:162, SEQ ID NO:163, SEQ ID NO:442, SEQ ID NO:445 are also present in this figure. Peptide/protein sequences are disclosed using one letter amino acid code. (10A) SEQ ID NO:639 to SEQ ID NO:675. IF1 proteins, from a wide diversity of species, aligned to show the incredible conservation of the bolded residues. From left to right, the 1st bolded reside is the “phosphorylation control switch” (when phosphorylated, IF1 protein cannot inhibit F₁F₀ ATP hydrolysis) and the other 4 bolded residues are part of the “pH dependence motif” [141, 138, 139] (underlining identifies a residue that deviates from the most stereotypical consensus sequence). In other protein sequence embodiments of this disclosure, one or more of these bolded residues are replaced with another amino acid, optionally coded for by the genetic code. For example, a bolded serine(S) residue, constituting the “phosphorylation control switch”, is replaced with a residue that cannot be phosphorylated (e.g. alanine), so that the IF1 protein cannot be inactivated by phosphorylation. The four other bolded residues are part of the “pH dependence motif” and amino acid substitution at one or more of its positions, optionally with alanine, increases IF1 protein inhibition of F₁F₀ ATP hydrolysis at pH 8, the normal (non-pathological) pH of the mitochondrial matrix. Also componentry to this disclosure are fragments of the shown sequences (e.g. without the Mitochondrial Import Sequence [MIS], which for human is MAVTALAARTWLGVWGVRTMQARGF [140], SEQ ID NO:162, or with a different MIS instead) and/or with a bolded residue(s) substituted for a different amino acid, optionally coded for by the genetic code. Especially favoured is a fragment with greater inhibition of F₁F₀ ATP hydrolysis at pH 8. Contemplated is a fragment that aligns with, and corresponds to, the “minimal inhibitory sequence” of bovine IF1 protein, which is the smallest, minimal fragment of bovine IF1 protein that can inhibit F₁F₀ ATP hydrolysis [141, 142], wherein a non-limiting candidate “minimal inhibitory sequence” is shown in the figure, corresponding to bovine IF1 protein residues 14-47, wherein it may actually be shorter/longer than shown (e.g. 10-47 or 16-47 or 17-47) or different (e.g. residues 42-58, or (unlikely)₂₂-46 of bovine IF1 protein). Following codes are “primary accession numbers” in UniProtKB database, SV =Sequence Version (newer sequence versions than presented herein are also hereby contemplated): (a) Q9 UII2, Homo sapiens, SV=1, (b) H2PYG9, Pan troglodytes, SV=1, (c) G3QEV8, Gorilla gorilla gorilla, SV=1, (d) F6ZXX7, Macaca mulatta, SV=1, (e) A0A2U3VIM7, Odobenus rosmarus divergens, SV=1, (f) A0A2Y9DM04, Trichechus manatus latirostris, SV=1, (g) A9XG49, Ailuropoda melanoleuca, SV=1, (h) E2QYN4, Canis lupus familiaris, SV=1, (i) M3WIS8, Felis catus, SV=2, (j) F6ZXTO, Equus caballus, SV=1, (k) A0A384CECO, Ursus maritimus, SV=1, (1) Q03344, Rattus norvegicus, SV=2, (m) A0A2Y9LD45, Delphinapterus leucas, SV=1, (n) G3SWQ8, Loxodonta africana, SV=1, (o) A0A2Y9EF27, Physeter catodon, SV=1, (p) G1SEZ3, Oryctolagus cuniculus, SV=1, (q) A0A286Y431, Cavia porcellus, SV=1, (r) A0A2U3VOR3, Tursiops truncatus, SV=1, (s) A0A383Z6R7, Balaenoptera acutorostrata scammoni, SV=1, (t) M3YVR5, Mustela putorius furo, SV=1, (u) Q29307, Sus scrofa, SV=2, (v) P01096, Bos taurus, SV=2, (w) Bovine “minimal inhibitory sequence” [141, 142], (x) G5AP86, Heterocephalus glaber, SV=1, (y) O35143, Mus musculus, SV=2, (z) S9XNE5, Camelus ferus, SV=1, (ai) A0A1S2ZPB9, Erinaceus europaeus, SV=1, (bi) A0A1U8CVF2, Mesocricetus auratus, SV=1, (ci) GINSN7, Myotis lucifugus, SV=1, (di) A0A151PGL2, Alligator mississippiensis, SV=1, (ei) AOAOB8RSH7, Boiga irregularis, SV=1, (fi) H2TBT1, Takifugu rubripes, SV=1, (gi) F7BK26, Xenopus tropicalis, SV=1, (hi) A0A3B4D9E6, Pygocentrus nattereri, SV=1, (ii) A0A1D5PBD2, Gallus gallus, SV=2, (ji) A3KNL5, Danio rerio, SV=1, (ki) A0A0E9WGC1, Anguilla anguilla, SV=1. (10B) SEQ ID NO: 676. The “phosphorylation control switch” and “pH dependence motif” of an IF1 protein [141, 138, 139]. In some embodiments, the amino acid at the “phosphorylation control switch” is substituted with a different amino acid coded for by the genetic code, preferably one that cannot be phosphorylated, optionally alanine (A). And/or one or more of the residues of the “pH dependence motif” are substituted with a different amino acid coded for by the genetic code, optionally, without restriction, tyrosine (Y), alanine (A), lysine (K), glutamate (E), glutamine (Q), valine (V), leucine (L), isoleucine (I), wherein alanine is preferred in some embodiments. Especially preferred is lysine (K) replacing the histidine (H) marked with a *, which corresponds to a H49K (“mature” [MIS cleaved off] IF1 protein numbering) substitution in the Bos taurus IF1 protein sequence. Alternatively, arginine (R) or alanine (A) replaces histidine at this position (H49R or H49A respectively). (10C) SEQ ID NO:677 to SEQ ID NO:708. Some embodiments, which are modifications of the human IF1 protein (in alternative embodiments, not shown, the N-terminal MIS sequence [first 25 residues] is absent). By the teaching of this figure, other IF1 protein(s), from human and/or other species, can be modified at one or more equivalent amino acid sequence positions i.e. at their own “phosphorylation control switch” and/or “pH dependence motif”, wherein such modified IF1 protein sequences are componentry to the present disclosure, as are nucleotide sequences that code for them by the genetic code. Any IF1 protein, e.g. any IF1 protein sequence from InterPro family “Mitochondrial ATPase inhibitor (IPR007648)”, and/or Pfam family “IATP (PF04568)”, with one or more amino acid substitutions within its “phosphorylation control switch” and/or “pH dependence motif”, wherein these sequence elements are herein defined, is componentry to the present disclosure. In further embodiments, not shown in the figure, the substituted residue at one or more of the 5 bolded positions can be any other amino acid coded for by the genetic code, wherein nucleotide sequences that encode them by the genetic code are contemplated. (10D) SEQ ID NO:709 to SEQ ID NO: 743. Preferred is an IF1 protein with the histidine (H) marked with a * in its “pH dependence motif” (FIG. 10B) replaced with lysine (K). Shown are illustrative IF1 proteins modified at this position. Wherein their site of lysine (K) substitution is bolded. As is 4 of the 5 residues of the enduring remainder of their “pH dependence motif”, which is unmodified. And their “phosphorylation control switch” residue, which is unmodified. These protein sequences are componentry to the present disclosure as are other equivalently modified IF1 proteins, not shown, as are nucleotide sequences that code for them by the genetic code, as are their sub-sequences, such as those with their N-terminal Mitochondrial Import Sequence (MIS) absent. Any IF1 protein, e.g. any IF1 protein sequence from InterPro family “Mitochondrial ATPase inhibitor (IPR007648)” and/or Pfam family “IATP (PF04568)”, with the starred (*) histidine (FIG. 10B) of its “pH dependence motif” replaced with a lysine (K), is componentry to this disclosure. Illustrative IF1 proteins modified at this position are shown in this figure (wherein the original unmodified sequences are also componentry to this disclosure, wherein later sequence versions (SV) are also contemplated): (a) Q9UII2, Homo sapiens, SV=1, (b) Q5RFJ9, Pongo abelii, SV=1, (c) A0A2R9CQC9, Pan paniscus, SV=1, (d) A0A2J8Y5Q9, Pongo abelii, SV=1, (e) H2PYG9, Pan troglodytes, SV=1, (f) A0A2I3H1P7, Nomascus leucogenys, SV=1, (g) G3QEV8, Gorilla gorilla gorilla, SV=1, (h) A0A2K6AYV8, Macaca nemestrina, SV=1, (i) A0A2K5Y149, Mandrillus leucophaeus, SV=1, (j) A0A2K5POW3, Cercocebus atys, SV=1, (k) G7NWV6, Macaca fascicularis, SV=1, (1) A0A096NQ00, Papio anubis, SV=1, (m) F6ZXX7, Macaca mulatta, SV=1, (n) A0A0D9S814, Chlorocebus sabaeus, SV=1, (0) A0A2K6N3T3, Rhinopithecus bieti, SV=1, (p) A0A2K6Q8H8, Rhinopithecus roxellana, SV=1, (q) A0A2K5SG67, Cebus capucinus imitator, SV=1, (r) A0A2K6SEK8, Saimiri boliviensis boliviensis, SV=1, (s) A0A2K5KBI5, Colobus angolensis palliatus, SV=1, (t) A0A2K5DQW7, Aotus nancymaae, SV=1, (u) F7IA10, Callithrix jacchus, SV=1, (v) A0AOD9SDU9, Chlorocebus sabaeus, SV=1, (w) A0A1D5QRM5, Macaca mulatta, SV=1, (x) A0A1U7SXJ3, Tarsius syrichta, SV=1, (y) A0A2K6Q8J3, Rhinopithecus roxellana, SV=1, (z) A0A2K6SEL7, Saimiri boliviensis boliviensis, SV=1, (ai) A0A2K6GYY1, Propithecus coquereli, SV=1, (bi) HOX2G2, Otolemur garnettii, SV=1, (ci) A0A2Y9GJM5, Neomonachus schauinslandi, SV=1, (di) A0A2K5J921, Colobus angolensis palliatus, SV=1, (ei) A0A2U3VIM7, Odobenus rosmarus divergens, SV=1, (fi) L8Y809, Tupaia chinensis, SV=1, (gi) L5JUT0, Pteropus alecto, SV=1, (hi) A0A2Y9DM04, Trichechus manatus latirostris, SV=1, (ii) A9XG49, Ailuropoda melanoleuca, SV=1. In other embodiments, not shown, instead of a H49K substitution, there is a H49A or H49R substitution instead. (10E) SEQ ID NO:744 to SEQ ID NO:780. Further IF1 proteins modified to have a lysine (K) at the starred (*) position of their “pH dependence motif” (FIG. 10B), wherein the corresponding unmodified native IF1 proteins are also contemplated (later sequence versions (SV) than shown are also contemplated): (a) E2QYN4, Canis lupus familiaris, SV=1, (b) M3WIS8, Felis catus, SV=2, (c) F6ZXTO, Equus caballus, SV=1, (d) HOXQ94, Otolemur garnettii, SV=1, (e) A0A384CECO, Ursus maritimus, SV=1, (f) D2GWK3, Ailuropoda melanoleuca, SV=1, (g) I3N8E6, Ictidomys tridecemlineatus, SV=1, (h) A0A2U3YF49, Leptonychotes weddellii, SV=1, (i) Q03344, Rattus norvegicus, SV=2, (j) A0A341D6Q8, Neophocaena asiaeorientalis asiaeorientalis, SV=1, (k) A0A2Y9LD45, Delphinapterus leucas, SV=1, (1) G3SWQ8, Loxodonta africana, SV=1, (m) A0A2Y9EF27, Physeter catodon, SV=1, (n) G1SEZ3, Oryctolagus cuniculus, SV=1, (0) A0A286Y431, Cavia porcellus, SV=1, (p) A0A340XS26, Lipotes vexillifer, SV=1, (q) A0A2U3Y890, Leptonychotes weddellii, SV=1, (r) A0A1A6FZ83, Neotoma lepida, SV=1, (s) A0A2Y9J3D1, Enhydra lutris kenyoni, SV=1, (t) A0A2U3VOR3, Tursiops truncatus, SV=1, (u) A0A383Z6R7, Balaenoptera acutorostrata scammoni, SV=1, (v) M3YVR5, Mustela putorius furo, SV=1, (w) Q29307, Sus scrofa, SV=2, (x) L8IJ24, Bos mutus, SV=1, (y) P01096, Bos taurus, SV=2, (z) A0A250Y8Y0, Castor canadensis, SV=1, (ai) G5AP86, Heterocephalus glaber, SV=1, (bi) 035143, Mus musculus, SV=2, (ci) G3H1Z3, Cricetulus griseus, SV=1, (di) S9XNE5, Camelus ferus, SV=1, (ei) A0A1S2ZPB9, Erinaceus europaeus, SV=1, (fi) A0A1U8CVF2, Mesocricetus auratus, SV=1, (gi) A0A091E4M7, Fukomys damarensis, SV=1, (hi) G1U0F8, Oryctolagus cuniculus, SV=1, (ii) G1PGS1, Myotis lucifugus, SV=1, (ji) F7BE70, Monodelphis domestica, SV=1, (ki) W5NYG6, Ovis aries, SV=1. In other embodiments, not shown, instead of a H49K substitution, there is a H49A or H49R substitution instead. (10F) SEQ ID NO:781. Compare and contrast this figure with FIG. 10B. Wherein the present figure shows features of some preferred IF1 protein variants, which have a “phosphorylation control switch” locked in the “on” position, and an attenuated “pH dependence motif”. (10G) SEQ ID NO:782 to SEQ ID NO:816. Especially preferred is an IF1 protein with its “phosphorylation control switch” residue set to alanine (A), which cannot be phosphorylated, and so cannot be switched “off”, and the starred (*) histidine (H) of its “pH dependence motif” (FIG. 10B) substituted with lysine (K). This figure shows illustrative IF1 proteins modified in this way. These sequences are componentry to the present disclosure as are other modified IF1 proteins, not shown, which are modified equivalently, as are nucleotide sequences that code for them by the genetic code, as are their protein/nucleotide sub-sequences e.g. with N-terminal Mitochondrial Import Sequence (MIS) absent. Any IF1 protein, e.g. any IF1 protein sequence from InterPro family “Mitochondrial ATPase inhibitor (IPR007648)” and/or Pfam family “IATP (PF04568)”, with its “phosphorylation control switch” residue (FIG. 10B) being alanine (A) and the starred (*) histidine (FIG. 10B) of its “pH dependence motif” substituted with lysine (K), is componentry to this disclosure. Illustrative IF1 proteins modified at these two positions are shown in this figure (wherein the original unmodified sequences are also componentry to this disclosure, later sequence versions (SV) are also contemplated): (a) Q9UII2, Homo sapiens, SV=1, (b) P01096, Bos taurus, SV=2, (c) O35143, Mus musculus, SV=2, (d) Q03344, Rattus norvegicus, SV=2, (e) G1SEZ3, Oryctolagus cuniculus, SV=1, (f) A0A286Y431, Cavia porcellus, SV=1, (g) E2QYN4, Canis lupus familiaris, SV=1, (h) M3WIS8, Felis catus, SV=2, (i) F6ZXT0, Equus caballus, SV=1, (j) G5AP86, Heterocephalus glaber, SV=1, (k) G3H1Z3, Cricetulus griseus, SV=1, (1) A0A1U8CVF2, Mesocricetus auratus, SV=1, (m) M3YVR5, Mustela putorius furo, SV=1, (n) A0A2Y9LD45, Delphinapterus leucas, SV=1, (o) G3SWQ8, Loxodonta africana, SV=1, (p) A0A2Y9EF27, Physeter catodon, SV=1, (q) Q5RFJ9, Pongo abelii, SV=1, (r) A0A2R9CQC9, Pan paniscus, SV=1, (s) A0A2J8Y5Q9, Pongo abelii, SV=1, (t) H2PYG9, Pan troglodytes, SV=1, (u) A0A213H1P7, Nomascus leucogenys, SV=1, (v) G3QEV8, Gorilla gorilla gorilla, SV=1, (w) A0A2K6AYV8, Macaca nemestrina, SV=1, (x) A0A2K5YI49, Mandrillus leucophaeus, SV=1, (y) A0A2K5P0W3, Cercocebus atys, SV=1, (z) G7NWV6, Macaca fascicularis, SV=1, (ai) A0A096NQ00, Papio anubis, SV=1, (bi) F6ZXX7, Macaca mulatta, SV=1, (ci) A0A0D9S814, Chlorocebus sabaeus, SV=1, (di) A0A2K6N3T3, Rhinopithecus bieti, SV=1, (ei) A0A2K6Q8H8, Rhinopithecus roxellana, SV=1, (fi) A0A2K5SG67, Cebus capucinus imitator, SV=1, (gi) A0A2K6SEK8, Saimiri boliviensis boliviensis, SV=1, (hi) A0A2K5KBI5, Colobus angolensis palliatus, SV=1, (ii) A0A2K5DQW7, Aotus nancymaae, SV=1. In other embodiments, not shown, instead of a H49K substitution, there is a H49A or H49R substitution instead. (10H) SEQ ID NO:817 to SEQ ID NO:836. Some preferred embodiments of this disclosure, applying teaching of FIG. 10F to the Human IF1 protein sequence. In further embodiments, shown, the N-terminal Mitochondrial Import Sequence (MIS) is absent. Not shown, but also contemplated, is wherein H56 (“mature” [without MIS] IF1 protein numbering), of the “pH dependence motif”, can optionally be substituted to alanine and/or wherein H49R or H49A is used instead of a H49K substitution. (10I) SEQ ID NO:837 to SEQ ID NO: 868. Bovine IF1 protein and some non-limiting fragment embodiments thereof. IF1 protein 1-60 fragment can't dimerize and exists as a monomer [143], 10-46 has ten-fold less activity than 10-47 showing the importance of the 47^{th} residue, 14-47 has been termed the “minimal inhibitory sequence” [142, 141], 22-46 can inhibit F1 ATP hydrolysis but not F₁F₀ ATP hydrolysis [144, 142]. 42-58 is an alternative “minimal inhibitory sequence” [144-147]. It might be that 42-58 inhibits F₁F₀ ATP hydrolysis by a different binding/mechanism than 14-47 and entire IF1 protein. (10J) SEQ ID NO:869 to SEQ ID NO:894. Human IF1 protein and some non-limiting fragment embodiments thereof. (10K) SEQ ID NO: 895 to SEQ ID NO:922. A sub-sequence/fragment of an IF1 protein, or sequence variant thereof, in either orientation (N to C, C to N), attached to a Mitochondrial Import Sequence (MIS), in either orientation, optionally the MIS of human IF1 protein (MAVTALAARTWLGVWGVRTMQARGF [SEQ ID NO: 162]) or that of a different IF1 protein, optionally that of a mammal, rodent or non-human primate, or attached to a MIS of another protein that is located to the mitochondrial matrix, is componentry to this disclosure (as are the nucleotide sequences that code for it), wherein illustrative example embodiments are shown. (10L) SEQ ID NO:923 to SEQ ID NO:950. An IF1 protein/fragment (and/or sequence variant thereof), in either orientation (N to C, C to N), attached to a (any) Cell Penetrating Peptide (CPP) sequence, in either orientation, optionally via a connecting glycine (increases flexibility between domains), wherein many such CPP sequences are known to those of the art: e.g. the HIV-1 Tat cell penetrating peptide sequence, YGRKKRRQRRR [SEQ ID NO:442], optionally flanked by glycines at one or both ends, at both ends: GYGRKKRRQRRRG [SEQ ID NO:445]. Furthermore, an IF1 protein fragment, or sequence variant thereof, in either orientation, attached to a Mitochondrial Import Sequence (MIS), in either orientation, optionally the MIS of human IF1 protein (or that of a different IF1 protein, optionally that of a mammal, rodent or non-human primate, or attached to a MIS of another protein that is located to the mitochondrial matrix), which is itself attached to a/any CPP sequence, in either orientation, optionally via a connecting glycine(s)/proline(s), is componentry to this disclosure (as are the nucleotide sequences that code for it), wherein illustrative example embodiments are shown. Encompassed by this disclosure: the domains can be ordered differently than shown in the figure e.g. the MIS can instead be “upstream” (closer to N terminus) of the CPP sequence, and all possible orientation (N to C, C to N) combinations are contemplated. (10M) SEQ ID NO:951 to SEQ ID NO: 978. An IF1 protein/fragment (or sequence variant thereof), in either orientation (N to C, C to N), attached to a/any CPP sequence, in either orientation, which is attached to an/any epitope/affinity tag sequence (many known to those of the art; non-limiting examples disclosed elsewhere herein, in the figure two examples are shown: HHHHHH [SEQ ID NO:131], HHHHHHDYKDDDDK [SEQ ID NO: 130]), in either orientation, optionally wherein the CPP sequence is flanked by 1-5 glycines and/or prolines (increases flexibility between domains). An IF1 protein/fragment (or sequence variant thereof), in either orientation (N to C, C to N), attached to a Mitochondrial Import Sequence (MIS), in either orientation, optionally the MIS of human IF1 protein (or that of a different IF1 protein, optionally that of a mammal, rodent or non-human primate, or attached to a MIS of another protein that is located to the mitochondrial matrix), which is itself attached to a/any CPP sequence, in either orientation, attached to an/any epitope/affinity tag sequence (many known to those of the art), in either orientation, optionally wherein the CPP sequence is flanked by 1-5 glycines and/or prolines. Encompassed by this disclosure: the domains can be ordered differently than shown e.g. the MIS can instead be “upstream” (closer to N terminus) of the CPP sequence and/or epitope/affinity tag sequence, the CPP sequence can be “upstream” of the epitope/affinity tag sequence etc. e.g. one or more domains can be attached to the C-terminus of IF1 protein/fragment (or sequence variant thereof). A benefit of having the MIS N-terminal to the IF1 protein/fragment (or sequence variant thereof), and the other domain(s) N-terminal to the MIS, is that when the MIS is cleaved off inside the mitochondrial matrix, the other domain(s) are cleaved off with it. Any IF1 protein/fragment (or sequence variant thereof), or concatenation(s) thereof, attached to a/any CPP and/or MIS and/or epitope/affinity tag sequence, optionally connected in one or more places by a connecting glycine(s)/proline(s) (or other connecting amino acid (aa) or short (<20 aa) amino acid sequence or linker sequence, optionally a protease/small molecule cleavage site), wherein all orientation (N to C or C to N) combinations are contemplated, is componentry to this disclosure, as are their coding nucleotide sequences. It will be appreciated by those skilled in the art that the order of these elements can be altered, and additional elements can be added so long as the functionality of the various elements is retained. How to produce these fusion proteins is known to those of the art, as for example described in [P14] (also see U.S. Pat. No. 6,498,020B1), the content and teachings of which are herein incorporated, in their entirety, by reference. (10N) SEQ ID NO:979 to SEQ ID NO:1071. Some embodiments. (10O) SEQ ID NO: 1072 to SEQ ID NO:1126. Some embodiments. (10P) SEQ ID NO:1127 to SEQ ID NO:1162. IF1 protein sequences from a number of long-lived species {are componentry to this disclosure, as is their use thereof [for at least one use disclosed herein]}: long-lived either in absolute terms and/or in relation to their size. Some of these sequences, such as that for the bowhead and blue whales, have never been reported before. Numbers in brackets are maximal lifespan in years (from [115]). Compared to the human number, which is drawn from a huge sample size, the other numbers, drawn from small sample sizes, are likely to be an underestimate of species maximal longevity. Some/all of the presented turtle/terrapin species may have “negligible senescence” [115]. The bolding highlights differences from the human IF1 protein sequence. Except for the very bottom, separated section, wherein bolding highlights differences from the presented naked mole rat IF1 protein sequence. Underlining is for a residue, different from human IF1 protein, and well conserved across whales/dolphins and long-lived reptiles/birds. By the teaching of this disclosure, a species with a longer lifespan tends to have a more potent IF1 protein, at normal mitochondrial matrix pH (8). This figure teaches some (not all) substitution(s)/addition(s) that can be made to human IF1 protein to confer a more potent IF1 protein, at normal mitochondrial matrix pH (8), which can confer slower aging and a longer human lifespan (if a higher ambient temperature and/or greater bodily insulation compensates for the upward shift in thermoneutral temperature). Or in a mouse, for example, with this modified human IF1 protein expressed. Changes in the first 25 residues of the presented human IF1 protein sequence are not desirable, because this is its Mitochondrial Import Sequence (MIS). In this figure, human is at the top, then going down: whales, dolphins, reptiles, bird, fish, “sea cow”, elephant, primates, rodents: (a) Homo sapiens. (b) Balaena mysticetus. (c) Balaenoptera physalus. (d) Balaenoptera musculus. (e) Megaptera novaeangliae. (f) Orcinus orca. (g) Physeter catodon. (h) Eschrichtius robustus. (i) Ziphius cavirostris. (j) Globicephala melas. (k) Balaenoptera acutorostrata scammoni. (l) Monodon monoceros. (m) Delphinapterus leucas. (n) Tursiops truncatus. (o) Lipotes vexillifer. (p) Chelonoidis abingdonii. The maximal lifespan shown is for a different species of Galápagos tortoise: Chelonoidis nigra. (q) Terrapene carolina triunguis. (r) Chelonia mydas. (s) Chrysemys picta bellii. (t) Trachemys scripta elegans. (u) Alligator mississippiensis. (v) Varanus komodoensis. (w) Crocodylus porosus. (x) Strigops habroptilus. (y) Anoplopoma fimbria. (z) Anguilla anguilla. (ai) Trichechus manatus latirostris. (bi) Loxodonta africana. (ci) Gorilla gorilla gorilla. (di) Cebus capucinus imitator. (ei) Saimiri boliviensis boliviensis. (fi) Callithrix jacchus. (gi) Carlito syrichta. (hi) Heterocephalus glaber. (ii) Cryptomys damarensis. (ji) Mus musculus. In other embodiments, not shown, the Mitochondrial Import Sequence (MIS) of these sequences is replaced by an MIS from a different species (preferably that for its native IF1 protein) e.g. a human/mouse MIS (e.g. that for its native IF1 protein). Preferably it is replaced by a MIS from the species that the protein sequence will be administered to/expressed in (e.g. that for its native IF1 protein). Also componentry to this disclosure is a fragment comprising (or consisting of) the 39^{th}-72^{nd} residues of the first sequence shown (human IF1, ≙14-47 with “mature” [without MIS] IF1 protein numbering, optionally wherein 1, 2, 3, 4 or 5 of its C-terminal residues are absent: ≙14-46, ≙14-45, ≙14-44, ≙14-43, ≙14-42), and the fragments that align with it in the sequences below, each as separate stand-alone peptide/protein sequences of this disclosure, wherein the concatenation of each at their N-terminal end with one or more of a MIS, CPP and affinity/epitope tag is also contemplated. If this fragment begins with a serine or threonine residue, in alternative embodiments, this is replaced with an alanine residue. Also componentry to this disclosure is the 67^{th}-83^{rd} residues of the first sequence shown (human IF1 protein, ≙42-58 “mature” IF1 protein numbering), and the fragments that align with it in the sequences below, each as separate stand-alone protein sequences of this disclosure, wherein the concatenation of each at their N-terminal end with one or more of a MIS, CPP and affinity/epitope tag is also contemplated. The IF1 protein sequence(s), and corresponding fragments thereof, of a different long-lived species (long-lived in absolute terms [preferred] and/or for its size), not shown here, is also componentry to this disclosure, as is its use thereof (for at least one use disclosed herein). In some embodiments, the protein administered/expressed is the same as the IF1 protein of the species being treated, or a fragment (or concatenation of fragments) thereof. (10Q) SEQ ID NO:1163 to SEQ ID NO:1198. The same sequences as the previous figure except that the 74^{th} residue of each is lysine (≙H49K) and, if a sequence's 39^{th} residue isn't already alanine, it is changed to be so (≙S14A, ≙T14A). In other embodiments, not shown, instead of a ≙H49K substitution, there is a ≙H49A or ≙H49R substitution instead. (10R) SEQ ID NO:1199 to SEQ ID NO: 1226. By the teaching of this application, some sequence variants of the bowhead whale IF1 protein, which are componentry to this disclosure, are shown. Note that this figure teaches more sequences than are actually shown because its accompanying text component, at its top (which includes mouse MIS sequence for its IF1 protein [SEQ ID NO:163]), teaches methods to arrive at further protein sequences of this disclosure that aren't shown (and this optional text instruction optionally applies to not just the sequences shown, but to other protein sequences in this application and/or of this disclosure). By this disclosure, one way that the inhibitory potency of an IF1 protein can be increased is by increasing the number of aspartic acid (D) residues at its C-terminus. Bowhead whale IF1 protein, and sequence variants thereof, are presented with one or more extra D residues at its C-terminus. In other protein sequence embodiments of this disclosure, one or more of the same modifications shown in this figure, at the equivalent position(s), is made for the IF1 protein of a different long-lived species e.g. a different long-lived species of whale (e.g. fin or blue whale). (10S) SEQ ID NO:1227 to SEQ ID NO:1263. At the very top is human IF1 protein and then bowhead whale IF1 protein immediately below it, with its residues distinct from human IF1 protein bolded, wherein its disparities from human IF1 protein that are well conserved across whales/dolphins and long-lived reptiles/birds are underlined. Thereafter are modified human IF1 protein sequences from the teaching of the bowhead whale sequence. This method of using an IF1 protein from a longer living species to instruct modification(s) to an IF1 protein from a shorter living species, to increase its inhibitory potency for F₁F₀ ATP hydrolysis at normal mitochondrial matrix pH (8), is componentry to this disclosure, as the use thereof of the resulting IF1 protein variant or fragment [or concatenated fragments] thereof (for at least one use disclosed herein). Some presented sequences have further modifications, beyond that by the teaching of the bowhead whale sequence, including one or more of ≙H49K, H55A, E26A substitutions, and/or one or more further D residues at the C-terminus, and/or D at the 79^{th} residue, which is what some long-living reptiles have at this position. Any combination/admixture of the bolded modifications to the human IF1 protein sequence in this figure, and not only the combinations shown, is componentry to this disclosure. When these protein sequences are administered/expressed in mice, it is preferable to substitute their human Mitochondrial Import Sequence (MIS) with such a sequence from mice, preferably that for their native IF1 protein. In other embodiments, not shown, instead of a ≙H49K substitution, there is a ≙H49A or ≙H49R substitution instead. (10T) SEQ ID NO:1264 to SEQ ID NO:1298. Some preferred (including the 14-47 and 42-58 [using “mature” {without MIS} IF1 protein numbering] sub-sequences) bowhead whale inspired sequences of the disclosure. Equivalent sequences derived using the IF1 protein sequence of a different long-lived species, e.g. a different long-lived whale (e.g. fin whale), are also componentry to this disclosure. (10U) SEQ ID NO: 1299 to SEQ ID NO:1327. Some preferred blue whale inspired sequences of the disclosure. In distinction to the bowhead whale, and like human, the blue whale has a residue at position 14 (“mature” IF1 protein numbering) that can be phosphorylated (threonine, human has serine). In some embodiments this is substituted for alanine (AT14A). The ≙42-58 sequence fragment, and associated derivatives, are not shown because these are the same as for the bowhead whale, presented earlier. (10V) SEQ ID NO: 1328 to SEQ ID NO:1362. Some preferred (including the 14-47 and 42-58 [using “mature” {without MIS} IF1 protein numbering] sub-sequences) human inspired sequences of the disclosure. Notably, for the 9^{th} sequence down, once the epitope tag sequence has been cleaved off (e.g. by Enterokinase), the sequence corresponds to an artificial concatenation of sequences that are naturally occurring in the human body. Thence, this is a very natural therapeutic. In some embodiments, it (and/or other peptide/protein sequence(s) of this disclosure, e.g. its 14-47 and/or 42-58 and/or 48-81 {or fragment thereof} fragment [“mature” (without MIS) IF1 protein numbering] with a concatenated human IF1 Mitochondrial Import Sequence (MIS) at its N-terminal end and then a CPP sequence concatenated to the N-terminal end of this, preferably a CPP correspondent to a sequence found in a protein naturally occurring in the human body) is administered topically/locally (thence bypassing proteases in systemic circulation), optionally to the skin/scalp, optionally as a cream, optionally as an anti-aging cosmetic/supplement (the resultant local reduction in metabolic heat production is mitigated by heat transfer from other body areas, especially via blood flow). In the sequences of this figure the CPP is R7, with a flanking glycine added to its C-terminal end (which is a “natural” sequence found within a human protein). In other embodiments, not shown, just R7 is used instead. Or R7 flanked at one or both of its ends with one or more glycine and/or proline residues (preferably less than 5, ideally 1 to 2). In other embodiments (not shown), Tat is used as the CPP instead, optionally flanked at one or both of its ends with one or more glycine and/or proline residues (preferably less than 5, ideally 1 to 2), optionally being YGRKKRRQRRRG [SEQ ID NO:446] or GYGRKKRRQRRRG [SEQ ID NO:445]. Indeed, in all figures herein, where the CPP is shown to be R7, in other embodiments it is a Tat sequence, or other CPP, and conversely, where the CPP is shown to be Tat, in other embodiments it is R7, or other CPP. In both cases, optionally flanked at one or both of its ends with one or more glycine and/or proline residues (preferably less than 5, ideally 1 to 2). In figures herein, where an affinity/epitope tag is shown, in other embodiments it is a different such tag of the art. (10W) SEQ ID NO:1363 to SEQ ID NO:1392. Some further preferred blue whale and human inspired sequences of the disclosure. (29X) SEQ ID NO:1393 to SEQ ID NO:1417. Illustrative, non-limiting, embodiments wherein a CPP sequence (R7 in this case, but in other embodiments a different CPP is used, for example, a longer poly-Arginine sequence is used, up to R50, optionally wherein one or more of these R residues have D-stereochemistry) is attached by a disulphide bond instead of a peptide bond. The bowhead whale derived variant sequences have the advantage that they use a cysteine internal to the IF1 sequence (not at the N- or C-terminal ends; this location to substitute in an internal cysteine was selected on the basis that IF1 of Gray whale has a cysteine in the equivalent position), wherein these cysteines are proximal to an aliphatic residue (flanked by alanines in one case, proximal to leucine in other), and so for both these reasons their disulphide bond is less susceptible to the problem of “disulfide bond exchange” (U.S. Pat. No. 9,255,124B2). In other embodiments, not shown, if there is not an aliphatic residue already next to a cysteine involved in a disulphide bond then one or more is inserted on one or both sides, optionally and independently in each case selected from alanine, valine, leucine, isoleucine. The attachment of more than one CPP sequence is contemplated. In the whale IF1 sequence variant with two cysteine residues, their connection directly to each other by a disulphide bond is contemplated (not shown), as is-alternatively-their parallel connection via a CPP linker sequence with cysteine residues in it, optionally at its either end (not shown), as is, in other embodiments, their further connection, or only one of them, via a CPP linker sequence that has an available cysteine, to a cysteine residue added to or near the N-terminus. (10Y) SEQ ID NO: 1418 to SEQ ID NO:1425. Some non-limiting peptide inhibitors of F₁F₀ ATP hydrolysis: melittin, pre-sequence of subunit IV of yeast cytochrome c oxidase, Syn-A2, Syn-C and Δ11,12 [4], bovine F₁ β subunit residues 394-413, 384-403, 404-423 [148]: these, and sequence variant(s) thereof, and concatenation(s) thereof, are componentry to this disclosure, as are nucleotide sequences that code for them. Encompassed by this disclosure: the domains can be ordered differently than shown e.g. the Mitochondrial Import Sequence (MIS) can instead be “upstream” (closer to N terminus) of the Cell Penetrating Peptide (CPP) Sequence and/or epitope/affinity tag sequence, the CPP sequence can be “upstream” of the “epitope/affinity tag sequence” etc. Any F₁F₀ ATP hydrolysis inhibitory peptide (or fragment thereof) or concatenation of such sequences (or concatenated fragments thereof), optionally sequence variant(s) thereof, attached to a CPP sequence and/or MIS and/or epitope/affinity tag sequence, wherein all orientation (N to C or C to N) combinations are contemplated, is componentry to this disclosure, as are their coding nucleotide sequences. (10Z) A few non-limiting example embodiments shown. In some embodiments one or more of the E in the EEE sub-sequence is (each independently) replaced with an amino acid whose side-chain is not negative, optionally leucine (L), glutamine (Q) or asparagine (N), optionally a non-proteingenic amino acid, optionally 5,6-dehydrohomoleucine (CAS: 73322-75-5; available from suppliers on www.labnetwork.com e.g. from Arena Chemical, La Mure, France) or(S)-2-amino-5-methylhexanoic acid (CAS: 31872-98-7; available on www.labnetwork.com e.g. from Astatech Inc., Bristol PA, USA). In some embodiments, in place of one or more histidines, (S)-2-amino-3-(1H-imidazol-1-yl) propanoic acid (CAS 114717-14-5; PubChem CID: 12311022; available from BOC sciences, Shirley, NY, USA, PubChem SID: 254789149) is incorporated into the peptide/protein chain instead. Optionally, one or more of the NH are replaced with NCH₃, especially preferred at one or more places on the peptide backbone i.e. one or more N° are methylated. Optionally, instead of N(CH₃)₂ as shown here, N(CH₃)₃ is at the N and/or C terminal ends. Or N(H)R, NR₂, CH₃, C(H₂)R, C(H)R₂, CR₃, R, wherein R is independently selected at each point of use from the options for R given in this disclosure in one of its paragraphs relating to modifying an N- and/or C-terminal end of a peptide/protein. D-amino acid in place of the corresponding L-amino acid, at one or more places, is componentry to this disclosure.

### EXAMPLE EMBODIMENTS OF THIS DISCLOSURE

[0265] The Drawings present some embodiments of this disclosure. Further examples are enumerations of Markush Formulas (I), (II), (III), (IV), (V) and (VI), presented henceforth. Note: none of these formulae share Markush symbols, which can be, for example, symbols of the type: Rₓ, wherein x is an integer and/or letter. Such symbols are well recognised by those of the art. Markush Formulas (I), (II), (III), (IV), (V) and (VI), presented henceforth, each have their own Markush symbols, as specified for each, in their own respective sections of this disclosure. Further examples are peptide/protein/polynucleotide embodiments of Formula (VII) and (VIII), including embodiments wherein one or more of a gene or nucleotide/DNA/RNA sequence is administered to the subject to administer a peptide/protein embodiment of Formula (VII) and/or (VIII) to the subject.

[0266] In this disclosure, the term “Formula [X]” is used when a statement is true for Formula (I), (II), (III), (IV), (V), (VI), (VII) and (VIII), and all are being referred to independently. A compound of Formula [X] is a compound of Formula (I), or Formula (II), or Formula (III), or Formula (IV), or Formula (V), or Formula (VI), or Formula (VII), or Formula (VIII), or any compound presented in this disclosure's Drawings, or any compound componentry to this disclosure.

[0267] This disclosure is described using these example embodiments but it isn't limited to these. These merely illustrate the disclosure. Compounds of other structures, which are identified as therapeutic/cosmetic inhibitors by the rationale and methods of the present disclosure, are also encompassed by the present disclosure.

[0268] An aspect of this disclosure is at least one compound of at least one of Formula (I), (II), (III), (IV), (V), (VI), (VII), (VIII), [X], and/or a pharmaceutically-acceptable salt, solvate, hydrate or prodrug thereof, and/or a pharmaceutical/cosmetic composition(s) comprising at least one compound of at least one of Formula (I), (II), (III), (IV), (V), (VI), (VII), (VIII), [X], and/or a F₁F₀ ATP hydrolysis inhibitor(s) (that preferably inhibits F₁F₀ ATP synthesis less or, more preferably, not at all), and/or a compound(s)/composition(s) that reduces F₁F₀ ATP hydrolysis, optionally any peptide/protein/polynucleotide comprising {or consisting of} at least one amino acid/nucleotide sequence in the Sequence Listing component of this application {or sequence variant thereof and/or fragment/concatenated fragments thereof} and/or a pharmaceutical/cosmetic composition thereof, for use in treating, ameliorating, preventing, reversing or combating a disease or disorder, or physiological process (and/or one or more of its consequences) or an unwanted/undesirable aesthetic(s), selected from the following list;

[0269] Encompassed by this disclosure is a method of treating, ameliorating, preventing, reversing or combating a disease or disorder, or physiological process (and/or one or more of its consequences) or an unwanted/undesirable aesthetic(s), in a subject, selected from:
[0270] (i) cancer, any cancer, neoplasia, metastasis, tumor formation/growth/implantation, tumorigenesis, solid tumor, blood borne tumor, cancer that is refractory or resistant to conventional chemotherapy, drug resistant tumor, multidrug resistant cancer;
[0271] (ii) cancer that metabolizes much of its glucose and/or glutamine to lactate, for example a cancer exhibiting the Warburg effect and/or a cancer that can be discriminated from surrounding tissue by PET imaging (e.g. ¹⁸F-FDG PET) and/or a cancer that uses more glucose than surrounding normal tissue and/or a glycolytic cancer and/or a non-oxidative cancer and/or a cancer that favours glycolytic rather than oxidative metabolism (wherein this correlates with cancer danger and poor prognosis and so dangerous cancers with poor prognosis are hereby contemplated) and/or a cancer releasing a lot of lactate (e.g. causing elevated blood lactate in the subject) and/or a cancer residing in extracellular acidity and/or a cancer with a low bioenergetic cellular index (BEC) value/score and/or a cancer using aerobic glycolysis and/or a cancer residing in hypoxia (e.g. hypoxic tumour, e.g. solid tumour) and/or a cancer that is predominantly/disproportionally utilizing ATP synthase in its “reverse” ATP consuming, instead of its “forward” ATP producing, mode and/or a cancer that's proliferation/viability/danger is reduced by administering a compound that selectively/preferentially inhibits/reduces F₁F₀ ATP hydrolysis, wherein the compound inhibits/reduces F₁F₀ ATP synthesis much less (e.g. >1000 fold less, e.g. >5000 fold less), minimally or not at all and/or a cancer that has a relatively (e.g. as compared to normal cells of the tissue from which the cancer derives) hyperpolarized membrane potential across its mitochondrial inner membrane and/or a cancer that has relatively (e.g. as compared to normal cells of the tissue from which the cancer derives) low intracellular Reactive Oxygen Species (ROS) concentration and/or a cancer with relatively (e.g. as compared to normal cells of the tissue from which the cancer derives) less susceptibility to a polyketide F₁F₀ ATP synthase inhibitor (e.g. Oligomycin A) because its metabolism is more glycolytic and less oxidative (e.g, wherein the cancer demonstrates the Warburg effect) and/or a cancer with high HIF-la gene expression (which incidentally tends to correlate with less susceptibility to a polyketide F₁F₀ ATP synthase inhibitor);
[0272] (iii) cancer originating in one of peripheral blood, bone marrow, lung, colon, Central Nervous System (CNS), brain, skin, ovary, kidney, prostate, breast/mammary gland; including metastatic forms of these cancers; cancer found in lymph node/bone/soft tissue/metastatic site(s) and/or found in/causing pleural effusion, ascites; Carcinoma, Adenocarcinoma, Squamous cell carcinoma, Large cell carcinoma, Cystadenocarcinoma, Clear cell carcinoma, Sarcoma, Blastoma, cancer of epithelial/fibroblast/promyeloblast/lymphoblast/T lymphoblast/B lymphocyte cell type, Multi Drug Resistant (MDR) cancer, Anaplastic cancer, Hematopoietic cancer, Acute Lymphoblastic Leukemia (ALL), Childhood/Adult T acute lymphoblastic leukemia, Precursor T-cell acute lymphoblastic leukemia, Acute Myeloid Leukemia (AML), Acute promyelocytic leukemia, Chronic Myeloid Leukemia/Chronic Myelogenous Leukemia (CML), CML in blast crisis, Cancer with Philadelphia chromosome (BCR-ABL1 positive), Myeloma, Multiple myeloma, Plasma cell myeloma, Plasmacytoma, Lymphoma, Large cell immunoblastic lymphoma, Anaplastic large cell lymphoma, ALK-positive anaplastic large cell lymphoma, ALK positive cancer, Non-Small Cell Lung Cancer (NSCLC), lung carcinoma, lung adenocarcinoma, Minimally invasive lung adenocarcinoma, Non-small cell lung carcinoma, lung squamous cell carcinoma, Mesothelioma, Pleural epithelioid mesothelioma, Pleural mesothelioma, Bronchioalveolar carcinoma, Large cell lung cancer, Large cell lung carcinoma, Colon carcinoma, Colorectal carcinoma, Colon adenocarcinoma, Colorectal adenocarcinoma, Dukes' type C colorectal adenocarcinoma, Dukes' type D colorectal adenocarcinoma, Astrocytoma, Glioblastoma, Gliosarcoma, Glioblastoma multiforme, Melanoma, Malignant melanoma, Cutaneous melanoma, Amelanotic melanoma, Ovarian adenocarcinoma, Ovarian endometrioid adenocarcinoma, Endometrioid carcinoma of ovary, High grade ovarian serous adenocarcinoma, Ovarian serous cystadenocarcinoma, Renal cell carcinoma, Renal cell adenocarcinoma, Papillary renal cell carcinoma, Clear cell renal cell carcinoma, Clear cell renal carcinoma, Multi Drug Resistant (MDR) renal cancer, Prostate carcinoma, Prostate adenocarcinoma, Androgen Receptor negative (AR−) prostate cancer, Breast carcinoma, Breast adenocarcinoma, Ductal carcinoma, Invasive ductal carcinoma, Luminal A breast cancer, Estrogen Receptor positive (ER+) breast cancer, Progesterone Receptor positive (PR+) breast cancer, Hormone Receptor positive (HR+) breast cancer, Hormone responsive breast cancer, Triple Negative Breast Cancer (TNBC), Hormone Receptor negative (HR−) breast cancer, Hormone resistant breast cancer, Estrogen Receptor negative (ER−) breast cancer, Progesterone Receptor negative (PR−) breast cancer, HER2 negative (HER2−) breast cancer;
[0273] (iv) cancer that causes/drives fever, for non-limiting example, Non Hodgkin Lymphoma (NHL), Hodgkin Lymphoma (HL), Multiple Myeloma (MM), acute or chronic leukaemia, Acute Myelogenous Leukemia (AML), hairy cell leukemia, blast crisis of Chronic Myelogenous Leukemia (CML), ovarian cancer, kidney cancer (renal cell cancer), liver cancer (hepatocellular carcinoma), cancer that has spread to the liver, soft tissue sarcoma, bone cancer, adrenal gland tumour (such as phaeochromocytoma), pancreatic carcinoma, bronchogenic carcinoma, atrial myxoma, brain tumour, glioblastoma multiforme, tumour in the hypothalamus (e.g. chordoid glioma), solid tumour, tumour causing an obstruction or blockage somewhere in the body, Castleman's disease;
[0274] (v) HIV associated cancer: AIDS-defining cancer (ADC, e.g. Kaposi Sarcoma (KS), Non-Hodgkin Lymphoma (NHL), aggressive B-cell non-Hodgkin lymphoma, primary lymphoma of brain, primary central nervous system lymphoma, Burkitt's lymphoma, Burkitt's-like lymphoma, diffuse large B-cell lymphoma (DLBCL), cervical cancer, cervical carcinoma, invasive cervical carcinoma), Non-AIDS Defining Cancer (NADC, type of cancer more likely to occur in people who are infected with HIV than in people who are not infected, e.g. Hodgkin lymphoma, HPV related cancer/neoplasm, oncogenic DNA virus associated/driven/generated cancer, cancer of the mouth, throat, liver, lung, head, neck, anus, rectum, colorectal cancer);
[0275] (vi) cancer that causes/drives cachexia;
[0276] (vii) cancer in a child/adolescent, childhood/pediatric cancer;
[0277] (viii) chemotherapy and/or radiotherapy and/or immunotherapy resistant/refractory cancer, chemoresistant and/or radioresistant cancer;
[0278] (ix) cancer occurring/associated with inflammation and/or with Tumour Associated Macrophages (TAMs);
[0279] (x) cachexia, cancer driven/associated cachexia, cachexia occurring with an end-stage illness (e.g. cancer, heart failure, chronic obstructive pulmonary disease (COPD), liver failure, kidney failure, stroke, rheumatoid arthritis, severe burn injury and HIV/AIDS), cancer fatigue, weight loss, weight loss for known or unknown reason, chronic wasting disease, atrophy, brown atrophy, frailty, frailty syndrome, aging frailty, geriatric syndrome, age-related cachexia and/or sarcopenia, weakness, wasting, Intensive Care Unit (ICU)-Acquired weakness, muscle wasting following severe trauma in ICU patients, post-intensive care syndrome (PICS), anorexia-cachexia, anorexia nervosa, bulimia nervosa, eating disorder, amenorrhea, underweight, low body mass index (BMI, e.g. <18.5), low body fat percentage, body composition change, wasting syndrome, HIV wasting syndrome, malnutrition, clinical malnutrition, starvation, kwashiorkor syndrome, marasmus syndrome, malabsorption, malabsorption due to parasitic/bacterial infection (e.g. helminthiasis, Whipple's disease, small intestine bacterial overgrowth (SIBO), giardiasis etc.), anemia, refeeding syndrome, appetite loss, catabolysis, muscle atrophy, asthenia, muscle weakness (myasthenia), weakness, sarcopenia, osteoporosis, cachexia associated with HIV, AIDS, multiple sclerosis, rheumatoid arthritis, familial amyloid polyneuropathy, chronic kidney disease, cystic fibrosis, multiple sclerosis, motor neuron disease, Parkinson's disease, dementia, Addison's disease, mercury poisoning (acrodynia), chronic pancreatitis, untreated/severe type 1 diabetes mellitus, hormonal deficiency, tuberculosis, gastroenteritis, diarrhea, dysentery, any digestive disease or disorder, any gastrointestinal disease or disorder including functional gastrointestinal disorders, coeliac disease, tropical sprue, irritable bowel syndrome, inflammatory bowel disease, Crohn's disease, ulcerative colitis, short bowl syndrome, congestive heart failure, constrictive pericarditis, bradycardia, chronic obstructive pulmonary disease (COPD), altitude sickness, hyperthyroidism (subclinical hyperthyroidism, Graves' disease, multinodular goiter, toxic adenoma, inflammation of the thyroid {thyroiditis}, pituitary adenoma), fatigue, chronic fatigue syndrome or any disease or disorder or pathology in which a body tissue(s) is undersupplied or underutilises (vs. its need) an energetic/chemical substrate(s), including O₂;
[0280] (xi) cancer associated fever, which is especially associated with, but not limited to, Non Hodgkin Lymphoma (NHL), Hodgkin Lymphoma (HL), Multiple Myeloma (MM), acute or chronic leukaemia, Acute Myelogenous Leukemia (AML), hairy cell leukemia, blast crisis of Chronic Myelogenous Leukemia (CML), ovarian cancer, kidney cancer (renal cell cancer), liver cancer (hepatocellular carcinoma), cancer that has spread to the liver, soft tissue sarcoma, bone cancer, adrenal gland tumour (such as phaeochromocytoma), pancreatic carcinoma, bronchogenic carcinoma, atrial myxoma, brain tumour, glioblastoma multiforme, tumour in the hypothalamus (e.g. chordoid glioma), solid tumour, tumour causing an obstruction or blockage somewhere in the body, Castleman's disease;
[0281] (xii) disease or disorder or physiological process or condition that drives to and/or that causes a higher than normal body temperature such as (to illustrate and not restrict) high environmental temperature (e.g. hot climate), ingesting an uncoupler (e.g. 2,4-dinitrophenol), infection, sepsis, neutropenic sepsis, stroke, fever, pyrexia, hyperpyrexia, hyperthermia, malignant hyperthermia, neuroleptic malignant syndrome, serotonin syndrome, toxic serotonin syndrome, thyroid storm, heatstroke, surgery related, menopause (“hot flushes”), infection (non-limiting e.g. roseola, measles, enteroviral infections, parasitic, viral, fungal, Chlamydial, Rickettsial, bacterial, mycobacterial, systemic bacterial, intravascular, HIV associated, nosocomial), pyrogenic infection, thermoregulatory disorder(s), connective tissue disease(s), Kawasaki syndrome, drug overdose, drug or drug withdrawal induced hyperthermia, alcohol/drug withdrawal, idiosyncratic drug reaction, fever of known or unknown or uncertain origin (non-limiting e.g. infectious disease(s), inflammation, immunological disease(s), non-infectious inflammatory disease(s) {non-limiting eg. systemic rheumatic and autoimmune diseases, vasculitis, granulomatous diseases, pyogenic granuloma(s), autoinflammatory syndromes}, tissue destruction, reaction to incompatible blood product(s), metabolic disorder(s), inherited metabolic disorder(s), cancer, neoplasm, endogenous or exogenous pyrogen(s), injury, head injury);
[0282] (xiii) normal or higher than normal body temperature and feeling hot, optionally uncomfortably hot (e.g. because of sweating more than desired/comfortable e.g. because the subject's body is overly exerted to stop/slow body temperature rising e.g. because the body's physiological cooling mechanisms are being heavily utilized), because of high environmental temperature (e.g. because of hot/tropical climate e.g. because of summer season);
[0283] (xiv) disease/disorder/injury/pathology/surgery treatable/ameliorated/prevented/combated/helped by conferring hypothermia in a subject for some medical or other purpose which can include (to illustrate and not restrict) extending survivability after injury/trauma (e.g. extending the time that a subject can safely await specialist medical facilities/attention/treatment after injury e.g. extending, beyond an hour, the “golden hour” for getting a seriously injured soldier [e.g. by gunshot(s) and/or injury/injuries due to explosion(s)] to a medical facility), slowing a chemical reaction(s) rate in a subject for therapeutic benefit, preventing/minimizing/slowing brain and/or tissue damage, slowing physiological/pathological processes (reaction rates are temperature dependent) and so “buying time” to get the subject to treatment for their emergency (e.g. trauma/traumatic blood loss/septic shock or other medical emergency), treating/reducing the severity of/preventing a secondary injury or secondary tissue/psychological damage resulting from a primary injury/disease/trauma/surgery (non-limiting e.g. where the secondary injury or tissue damage is one or more of systemic inflammatory response syndrome (SIRS), sepsis, bacterial/fungal/viral infection, post-intensive care syndrome {PICS}, depression, anxiety, post-traumatic stress disorder, intensive care unit (ICU)-acquired neuromuscular weakness), slowing the progress of sepsis until a sufficient concentration of a working antibiotic(s) can be built up in the subject (furthermore hypothermia, by slowing sepsis progression, buys time to observe which antibiotic(s) can work, yielding time to try alternative further antibiotic option(s) if required), used soon after or just before clinical/legal death to preserve the subject's organs/tissues until the subject can be frozen/cryogenically frozen or the pathology that caused clinical/legal death (e.g. wound) can be fixed and the subject resuscitated, administered to a subject when a first responder (e.g. ambulance crew, e.g. soldier) deems the subject dead or unlikely to survive the journey to a medical facility (e.g. hospital) wherein this administration helps to preserve the subject which is helpful if hospital staff subsequently assess that they can, or might be able to, save the subject, stabilizing surgical/trauma/Emergency Room (ER) patients, deep hypothermic circulatory arrest for surgery (DHCA, non-limiting applications of DHCA include repairs of the aortic arch, repairs to head and neck great vessels, repair of large cerebral aneurysms, repair of cerebral arteriovenous malformations, pulmonary thromboendarterectomy, resection of tumors that have invaded the vena cava, brain tumor resection {wherein the anti-cancer activity of a compound(s) of this disclosure juxtaposes well}), Emergency Preservation and Resuscitation (EPR), hypothermia for a surgical purpose, protective hypothermia during surgery and/or surgery complication, hypothermia to slow/reduce blood loss, hypothermia for neuro- and/or cardio- and/or organ/tissue and/or life protection in a subject that has trauma/brain trauma/polytrauma/surgery/stroke/ischemic stroke/hemorrhagic stroke/cardiac arrest/myocardial infarction/hypoxia/shock (including, without limitation, low volume, cardiogenic, obstructive, and distributive shock)/sepsis/septic shock/multiple organ dysfunction syndrome/systemic inflammatory response syndrome (SIRS)/organ failure/cytokine storm/anaphylactic shock/seizure/disseminated intravascular coagulation/blocked airway/croup/rhabdomyolysis/[head/facial/spinal/chest/abdominal/ballistic/knife injury/trauma], or some other medical emergency/condition/disorder/disease/injury/operation, hypothermia for cardiac and/or cardiovascular surgery and/or open heart surgery and/or brain surgery (neurosurgery) and/or surgery using total circulatory arrest and/or surgery using cardiopulmonary bypass, Emergency Preservation and Resuscitation (EPR), preserving detached body parts such as limbs and/or organs (for example during organ storage/transport and/or transplant, thus increasing the time window for transplantation of organs to recipients; compound(s) of this disclosure is administered to organ to be transplanted [by administration to donor and/or by administration to isolated organ] and/or to organ recipient, optionally during transplant operation), protective hypothermia, targeted temperature management, therapeutic hypothermia, therapeutic hypothermia as adjunct treatment (e.g. protective adjunct) to a medical proceedure/surgery (non-limiting examples: amputation, vascular neurosurgery, aortic aneurysm repair, cardiovascular surgery, cardiac surgery with cardio-pulmonary bypass, cardioplegia for bypass surgery, coronary artery bypass graft (CABG) surgery, angioplasty, post-angioplasty), hypothermia therapy for stroke, acute ischemic stroke, acute global ischemia and hypoxia, burn(s), radiation injury, traumatic brain injury (TBI), blunt force trauma, trauma, trauma caused by an external physical source, trauma caused by surgery/elective surgery/planned surgery/emergency surgery, battlefield wound(s), bullet/knife wound, bleeding, hemorrhage, blood loss, blood clotting disorder, hypovolemia, hypovolemic shock, hemorrhagic shock, hematologic shock, shock, multi-system organ failure, multiple organ dysfunction syndrome, subarachnoid haemorrhage, aneurysm, ruptured/leaking aneurysm, aneurysmal subarachnoid haemorrhage, intracranial pressure elevation, intracranial aneurysm repair, intracerebral hemorrhage, traumatic intracranial hypertension, spinal cord injury, cardiac arrest, heart attack, myocardial infarction, acute myocardial infarction, heart failure (optionally left-sided, right-sided, systolic, diastolic or congestive heart failure), acute coronary syndrome, unstable angina, cardiogenic shock, hepatic encephalopathy, acute liver failure encephalopathy, acute liver failure, reperfusion injury, reperfusion injury post acute myocardial infarction, hypoxic/ischemia/ischemic/reperfusion injury, inflamation, neonatal peripartum encephalopathy, neonatal encephalopathy due to intrapartum asphyxia, neonate with perinatal asphyxial encephalopathy, neonatal encephalopathy, neonatal hypoxia-ischemia, neonatal hypoxia/ischemia, birth asphyxia, hypoxic-ischemic encephalopathy (HIE), haemorrhage, hypovolemia, exsanguination, decompression sickness, acute respiratory distress syndrome (ARDS), burn injury(s) including skin burn, inflammation, allergic reaction, anaphylaxis, tissue/organ rejection, hypoxia, hypoxemia, anoxemia, anoxia, anemia, hypervolemia, altitude sickness, obstructed airway, asthma attack, hypoxia in a body/tissue/organ, hypoglycemia, reperfusion injury (ischemia-reperfusion injury), upon release of a ligature or tourniquet, uraemia, crush syndrome, compartment syndrome, traumatic brain and/or spinal cord injury, major trauma, infection, bacterial and/or viral infection(s) (non-limiting e.g. meningitis), sepsis, septic shock, systemic inflammatory response syndrome (SIRS), stroke, cerebrovascular disease, ischemic brain injury, ischemic stroke, cerebral/brain ischemia, traumatic injury, brain injury, spinal cord injury, cardiac arrest, heart failure, congestive heart failure, Dilated cardiomyopathy, valvular heart disease, pulmonary embolism, adrenal crisis, Addisonian crisis, hypertensive emergency, haemorrhagic (hypovolemic) shock, cardiogenic shock, neurogenic shock, hepatic encephalopathy, blood loss, ischemic brain/heart/kidney/intestinal injury, autoimmune disease, status epilepticus, encephalitis/meningitis, chronic obstructive pulmonary disease (COPD), uremia, kidney disease, liver disease, pancreatitis, gastritis, infection (bacterial, viral or fungal), post-intensive care syndrome (PICS), intensive care unit (ICU)-acquired neuromuscular weakness (optionally in form of/because of one or more of critical illness polyneuropathy (CIP), critical illness myopathy (CIM), prolonged neuromuscular blockade, prolonged mechanical ventilation, disuse atrophy, prolonged immobility, poor mobility, recurrent falls, quadriparesis, tetraparesis), neuroprotection and/or cardioprotection and/or tissue protection during/after a stroke and/or ischemia and/or cardiac arrest and/or resuscitation and/or a period(s) of poor blood flow anywhere in a subject, hypoxic/ischemic condition caused by disease, injury, or a medical procedure (e.g. surgery);
[0284] (xv) poisoning by a toxic amount of a compound(s) in a subject (non-limiting e.g. carbon monoxide/methanol/heavy metal/ethylene glycol/pesticide poisoning, snake/spider/bee/insect/lizard venom, metabolic poison(s), nerve agent, chemical weapon, bacterial toxin(s) (e.g. food poisoning, Salmonella poisoning), endotoxemia, eukaryote produced toxin(s) e.g. (non-limiting) brevetoxin, drug(s)/substance(s) overdose e.g. (non-limiting) heroin, ethanol, a prescription medication(s), an over the counter medication(s) such as aspirin, paracetamol etc.; hypothermia is protective to toxic insult);
[0285] (xvi) hypermetabolism (optionally because of one or more of, without restriction, traumatic brain injury, injury to the body, infection, sepsis, burn, multiple trauma, fever, long-bone fracture, hyperthyroidism, prolonged steroid therapy, surgery, bone marrow transplant, recovery from anorexia/bulimia), heat intolerence, insomnia, fatal insomnia, nervousness, Luft's disease, non-thyroidal hypermetabolism, thyrotoxicosis, hyperthyroidism, overactive thyroid, subclinical hyperthyroidism, too much thyroid hormone(s) in the subject,
[0286] too much triiodothyronine (T3) and/or thyroxine (T4) in the subject, hyperthyroxinemia (including, without restriction, familial dysalbuminemic hyperthyroxinemia, familial euthyroid hyperthyroxinemia, thyroid hormone resistance syndrome), thyroid storm, hyperthyroidism caused by one or more of (without restriction) Graves' disease, thyroiditis,
[0287] Hashimoto's thyroiditis, subacute thyroiditis, postpartum thyroiditis, lumps (nodules) on the thyroid, enlarged thyroid gland (goitre), simple goitre, multinodular goiter, toxic multinodular goiter, toxic adenoma, toxic thyroid adenoma, inflammation of the thyroid, hyperplasia of thyroid, metastatic thyroid cancer, thyroid tumour, thyroid cancer (including, without restriction, papillary carcinoma, follicular carcinoma, medullary thyroid carcinoma, anaplastic thyroid carcinoma), eating too much iodine, goitrogen ingestion, consumption of ground beef contaminated with thyroid tissue (“hamburger hyperthyroidism”), too much synthetic thyroid hormone in the subject, pituitary adenoma, drug induced, Amiodarone drug induced, struma ovarii, Jod-Basedow syndrome, nonautoimmune autosomal dominant hyperthyroidism;
[0288] (xvii) low or less than desired metabolic/bioenergetic efficiency in a subject, or low or less than desired physical or mental performance (e.g. memory, IQ), or low or less than desired body weight, or fatigue/tiredness/weakness/exhaustion; compound(s) administration to cause greater metabolic/bioenergetic efficiency in the subject, enhancing their physical and/or mental performance and/or causing body weight gain;
[0289] (xviii) accelerated/premature aging, any accelerated aging disease, any progeroid syndrome, including (to illustrate and not restrict) premature aging because of chemo-/radio-/cancer therapy, Werner syndrome, Bloom syndrome, De Barsy syndrome, Rothmund-Thomson syndrome, Cockayne syndrome, xeroderma pigmentosum, trichothiodystrophy, combined xeroderma pigmentosum-Cockayne syndrome, restrictive dermopathy, Wiedemann-Rautenstrauch syndrome, Hutchinson-Gilford progeria syndrome (progeria), a laminopathy, Ataxia telangiectasia-like disorder 2, XFE progeroid syndrome, Muscular dystrophy, Muscular Dystrophy (Becker's, Duchenne, Limb-Girdle), Yamamoto's Muscular Dystrophy, Mandibuloacral dysplasia, Dilated cardiomyopathy, GAPO syndrome, Cutis laxia, Ehlers-Danlos syndrome, Lenz-Majewski hyperostatic dwarfism, SHORT syndrome, Progressive external opthalmoplegia, Nester-Guillermo progeria syndrome, MDPL syndrome, Dyskeratosis congenital, Down syndrome;
[0290] (xix) disease or disorder of aging (incidence/severity increases with increased age/senescence) and/or unwanted/undesirable aspect(s) of aging {and/or a disease/disorder associated with elevated Reactive Oxygen Species [ROS]} including (to illustrate and not restrict) age-associated decline, age-related/correlated disease/disorder/condition, aging frailty, frailty, frailty syndrome, wasting, sarcopenia, muscle weakness, weakness, muscle fatigue, weight loss, cachexia, functional decline, osteoporosis, sclerosis, kyphosis, reduction in bone density, cognitive decline, neurological decline, cognitive deficit, cognitive impairment, mild cognitive impairment, depression, degenerative diseases, neurodegenerative diseases, motor-associated neurodegenerative diseases, motor neuron disease, motor neuron dysfunction, amyotrophic lateral sclerosis (ALS), primary lateral sclerosis, progressive muscular atrophy, age-related muscular atrophy, age-related fat loss, progressive bulbar palsy, progressive supranuclear palsy, pseudobulbar palsy, hereditary spastic paraplegia, Parkinson's disease, parkinsonism, Multiple System Atrophy (MSA), Progressive Supranuclear Palsy (PSP), essential tremor, resting tremor, Alzheimer's disease, Huntington's disease, spinocerebellar ataxias, Friedreich's ataxia, cerebellar ataxia, dysautonomia, dementia, frontotemporal dementia, chronic traumatic encephalopathy, memory loss, aged cognition, age/aging related cognitive decline/impairment, congential epilepsy, Batten disease, polyglutamine diseases, atherosclerosis, atherosclerotic plaque in a blood vessel, arteriosclerosis, vascular stiffening, arterial stiffness, stiffened arteries, hypertension, cardiovascular disease(s), myocardial infarction, acute myocardial infarction, angina, arrhythmia, cardiomyopathy, congestive heart failure, coronary artery disease, carotid artery disease, endocarditis, coronary thrombosis, myocardial infarction, ischemia reperfusion injury, anemia, hypertension, aortic aneurysm, cardiac diastolic dysfunction, irregularity in heart rhythm, decrease in cardiac stress tolerance, increase in the cross-sectional area of cardiomyocyte(s), hypercholesterolemia, hyperlipidemia, mitral valve prolapsed, peripheral vascular disease, cardiac stress resistance, brain aneurysm, inflammatory or autoimmune disease, cerebrovascular disease, stroke, heart failure, heart failure with preserved ejection fraction, fibrosis, idiopathic pulmonary fibrosis (IPF), pulmonary fibrosis, fibrotic disease, cardiac fibrosis, liver fibrosis, pancreatic fibrosis, oral submucosa fibrosis, cystic fibrosis, gum recession, gingival recession, oral mucositis, pulmonary disease, age-related loss of pulmonary function, chronic obstructive pulmonary disease, emphysema, bronchiectasis, coronary artery disease, hypercholesterolemia, liver disease, fatty liver disease, metabolic syndrome, lysosomal storage disease, amyloidosis, systemic sclerosis, kidney disease, chronic kidney disease, renal disease, renal failure, end-stage renal disease (ESRD), renal insufficiency, glomerulosclerosis, cirrhosis, hepatic cirrhosis, hepatic insufficiency, immunosenscence, clonal hematopoiesis, Chronic Obstructive Pulmonary Disease (COPD), emphysema, breathlessness, asthma, hypertension, hypercholesterolemia, age-related thymic atrophy, chronic inflammatory disease(s), joint pain, arthritis, osteoarthritis, osteoarthritis of knee(s), arthritis (Osteo and Rheumatoid), Rheumatoid Arthritis, Juvenile Rheumatoid Arthritis (JRA), arthrosis, herniated intervertebral disc, kyphosis, hernia, herniated intervertebral discs, degenerative disc disease, vertebral disc degeneration, tendinopathy, androgenetic alopecia, male-pattern baldness, hair loss, Idiopathic Pulmonary Fibrosis, systemic sclerosis, Psoriasis, age-related loss of cardiac/pulmonary/cognitive/vision function, decrease in cardiac stress tolerance, insulin sensitivity, poor glycemic control, diabetes, type 1 diabetes, type 2 diabetes, diabetic ulcer, diabetic retinopathy, diabetic neuropathy, diabetic nephropathy (diabetic kidney disease), diabetic ulcer, boutonneuse fever, obesity, metabolic disease/syndrome/dysfunction, inflammatory bowel disease, andropause, retinal degeneration, sarcopenia, cachexia, age-related cachexia and/or sarcopenia, macular degeneration, age-related macular degeneration (AMD, early/intermediate/late), age-related wet macular degeneration, neovascular/wet AMD, dry age-related macular degeneration, dry AMD, Geographic atrophy (GA), dry age-related macular degeneration with geographic atrophy, wet and dry AMD in the same eye(s), Stargardt's macular degeneration, Best vitelliform macular dystrophy, retinopathy, diabetic retinopathy, proliferative diabetic retinopathy, diabetic macular edema, age/aging-related eye disease, ophthalmological/ophthalmic disease/disorder/condition, ocular disease, vision loss, blindness, progressive vision impairment, myopia (short-sightedness), degenerative myopia, hyperopia (far-sightedness), accommodative dysfunction, glaucoma, progressive glaucoma, cataract formation, cataract(s), retinal degeneration, progressive retinal degeneration, presbyopia, vision loss, retinitis pigmentosa, leber hereditary optic neuropathy, Fuchs spot, Best's disease, Sorsby's fundus dystrophy, vaso-obliteration in eye(s), oxygen induced vaso-obliteration, neovascularization in eye(s), hearing loss (e.g. age-related), deafness, presbycusis, tinnitus, naive T cell shortage, movement disability, nonalcoholic fatty liver disease (NAFLD), nonalcoholic steatohepatitis (NASH), immunosenescence, immune senescence, poor immune response to a vaccine(s) (so countering this improves vaccine response=improves the protection conferred by a vaccine), respiratory/urinary tract infection (RTI/UTI) especially in older/aged/elderly subjects, loss of bladder control, lower urinary tract symptoms (LUTS), Benign Prostatic Hyperplasia (BPH), hyperplasia, polycystic kidney disease, cancer, age-related cellular hypertrophy, dermatological disease/disorder, eczema, psoriasis, hyperpigmentation, nevi, rashes, atopic dermatitis, urticaria, diseases/disorders related to photosensitivity/photoaging, rhytides, pruritis, dysesthesia, eczematous eruptions, eosinophilic dermatosis, reactive neutrophilic dermatosis, pemphigus, pemphigoid, immunobullous dermatosis, fibrohistocytic proliferations of skin, cutaneous lymphomas, cutaneous lupus, a hallmark(s) of aging, genomic instability, telomere attrition, epigenetic alteration(s), loss of proteostasis, deregulated nutrient sensing, mitochondrial dysfunction, cellular senescence, stem cell exhaustion, altered intercellular communication, homeostatic imbalance, reduced fitness, reduced reproductive fitness, infertility, incontinence, sleep disturbances, imbalance, fear, depression, ulcers;
[0291] (xx) aging and/or one or more signs of aging, wherein one or more of these compounds slow/delay/reduce/treat/prevent/stop/reverse aging, and/or extend lifespan and/or healthspan, and/or treat or delay the onset of geriatric aging of the human/animal body, tissue(s), or organ(s), and/or treat or delay the onset of an age-associated phenotype in a cell(s)/organism(s), and/or prolong fertility e.g. female fertility, delay menopause;
[0292] (xxi) skin aging and/or damage (including sun damage and/or photoaging), one or more signs of skin/scalp aging/age-correlated damage: non-limiting e.g. lateral canthal lines (crow's feet), liver/age spot(s), skin wrinkle(s) [e.g. facial wrinkles], fine lines in the skin (e.g. around the eyes and/or mouth), expression lines, laxity (sagging), rhytids (wrinkles), erythema (redness), dyspigmentation (brown discoloration [s]), dark circles under the eyes, “bags” under the eyes, solar elastosis (yellowing), keratoses (abnormal growths), poor skin texture, hair greying/loss etc;
[0293] (xxii) any pathology/condition/disease/disorder characterized by too much/inappropriate/undesired signals/activity/electrical activity in the nervous system including (to illustrate and not restrict) insomnia, fatal insomnia, sleep onset latency, delayed sleep phase disorder, exploding head syndrome, parasomnia, sleep-maintenance insomnia, sleep disorder, too much/inappropriate/undesired signals/activity/electrical activity in the nervous system, hyperactivity, hypersensitivity, premature ejaculation, hyperreflexia, Autonomic dysreflexia (AD), Hyperventilation syndrome, brain hyperactivity, overly sensitive sensory system, pathological crying and/or laughing, Pseudobulbar affect (PBA, emotional lability), Alzheimer's agitation, photophobia, phonophobia, temperature-sensitive, pressure-sensitive, brain hyperexcitability, overstimulation, intrusive thought(s), Perseveration, sensory overload, disorganized thinking, fantasy prone personality, malapdative daydreaming, dissociation, hyperkinetic disorder, agitation, Psychomotor agitation, restlessness, difficulty controlling behaviour, disruptive behaviour disorder, Emotional and behavioral disorder, pervasive developmental disorder, Overactive disorder associated with mental retardation and stereotyped movements, attention-deficit disorder, Attention Deficit Hyperactivity Disorder (ADHD), adult attention-deficit hyperactivity disorder, severe behavioral problem(s) in children (e.g., to illustrate and not restrict, combativeness and/or explosive hyperexcitable behavior {out of proportion to immediate provocation [s]}, hyperactive children who show excessive motor activity with accompanying conduct disorders consisting of one or more of: impulsivity, difficulty sustaining attention, aggressivity, mood lability, poor frustration tolerance), Premenstrual dysphoric disorder (PMDD), premenstrual syndrome (PMS), impulsiveness, impulsivity, impulse control disorder, lack of self-control, hysteria, histrionic personality disorder, attention difficulty, inattention, poor attention control, anxiety, paranoid anxiety, Paranoid personality disorder, distress, dysphoria, Adjustment disorder, separation anxiety, anxiety disorder, depressive anxiety, agitated depression, treatment-resistant depression, Generalized anxiety disorder, social anxiety disorder, stranger anxiety, separation anxiety (e.g. in dogs left at home), separation anxiety disorder, Mixed anxiety-depressive disorder, depression (all forms, all severities), restlessness/apprehension/anxiety before surgery, hypochondria, panic disorder, panic attack, emotional outburst, emotional instability, Intermittent explosive disorder, unreasonable/unwarranted anger/aggression, hyper-aggression, hostility, rage, poor temper control, self-hatred, poor attentional control, worry, irritability, neuroses, somatization disorder, somatic symptom disorder, pain disorder, psychological pain, psychogenic pain, psychogenic facial pain, Atypical odontalgia (AO), burning mouth syndrome, throbbing, toothache/pulpitis/dental pain, chronic lower back pain, negative emotion, persistent/enduring negative emotion, body dysmorphic disorder, factitious disorder, illness anxiety disorder, unwarrented fight-or-flight response, stress, emotional stress, emotional dysregulation, distress, psychological stress, acute stress, chronic stress, acute stress reaction, combat stress reaction, traumatic grief, grief, grief after death of loved one, Prolonged grief disorder (PGD), heartbreak, guilt, shame, remorse, emotional pain, Algopsychalia, psychalgia, suffering, emotional trauma, psychological trauma, broken heart, Post Traumatic Stress Disorder (PTSD), Complex post-traumatic stress disorder (C-PTSD), hypervigilance, sympathetic hyperactivity, inability or impaired ability to relax, flashbacks, dysphoric hyperarousal, agoraphobia, insomnia, fatal insomnia, mood disorder, irrational/unwarrented fear/terror, phobia, social phobia, Cancerophobia, thunderstorm/firework phobia, hypersexuality, hypersexual disorder, depression, clinical depression, unipolar depression, bipolar disorder, Bipolar I, Bipolar II, Bipolar disorder not otherwise specified (Bipolar NOS), cyclothymia, cyclothymic disorder, mixed affective state, atypical depression, melancholic depression, postpartum depression, double depression, seasonal affective disorder, mania, manic episode, hypomania, increase in energy of psychomotor activity, delirium, excited delirium, major depressive disorder, minor depressive disorder, recurrent brief depression, Depressive Disorder Not Otherwise Specified (DD-NOS), major depressive episode, persistent depressive disorder (PDD), dysthymia, dysthymic disorder, absence of euthymia, manic thoughts, racing thoughts, thought disorder, disordered thinking, reduced ability to plan and execute tasks, paranoia, hallucination (including, without limitation, visual, auditory, olfactory, gustatory, tactile, proprioceptive, equilibrioceptive, nociceptive, thermoceptive, chronoceptive), Charles Bonnet syndrome, delusion, persecutory delusion, hearing voices, homicidal/criminal ideation/tendency/thoughts, suicidal ideation/tendancy/thoughts, self-injury, non-suicidal self-injury, violence, attacking others, negative mood swing, personality disorder, Borderline personality disorder, Narcissistic personality disorder, malignant narcissism, dissociative disorder, dissociative identity disorder (DID), Psychosis, acute psychosis, chronic psychosis, psychosis spectrum disorder, manifestations of psychotic disorders, behavioral complications of mental retardation, stimulant psychosis, psychotic depression, hallucinogen persisting perception disorder, Psychoactive substance-related disorder, amphetamine-induced psychosis, brief psychotic disorder, Brief reactive psychosis, Menstrual psychosis, postpartum psychosis, Psychotic disorder, Psychopathy, chronic hallucinatory psychosis, manifestation(s) of psychotic disorder, neurotic/reactive/endogenous/involutional/psychotic depression/depressive disorder (optionally accompanied by anxiety or agitation), depressive neurosis, delusional depression, psychotic aggression, psychiatric symptoms of dementia, AIDS delirium, Supersensitivity psychosis, Tardive psychosis, Tardive dysmentia, Depersonalization disorder, out-of-body experience, Sociopathy, Schizophrenia, Paranoid schizophrenia, disorganized-type schizophrenia, simple-type schizophrenia, pseudoneurotic schizophrenia, prodromal schizophrenia, schizoaffective disorder, bipolar type schizoaffective disorder, depressive type schizoaffective disorder, schizoaffective psychosis, Schizotypal personality disorder, schizophreniform disorder, Delusional parasitosis, formication, paresthesias, Acroparesthesia, tinnitus, delusional disorder, delusional jealousy, inappropriate behaviour, behavioural disorder, antisocial personality disorder, Oppositional defiant disorder (ODD), conduct disorder (CD), Disruptive mood dysregulation disorder (DMDD), sadistic personality disorder, poor inhibitory control, kleptomania, Pyromania, trichotillomania, dermatillomania, pathological/problem gambling, dyskinesia, tardive dyskinesia, paroxysmal dyskinesia, Paroxysmal kinesigenic dyskinesia, Paroxysmal nonkinesigenic dyskinesia, Paroxysmal exercise-induced dystonia, Hemiballismus, tic disorder, tremor, clonus, Tourette's syndrome, coprolalia, copropraxia, Echophenomena, Echopraxia, Echolalia, Palilalia, stuttering/stammering, stereotypy, punding, Self-stimulatory behaviour (stimming), Stereotypic movement disorder (SMD), synesthesia, obsession, Obsessive-compulsive disorder (OCD), obsessive-compulsive personality disorder, anankastic personality disorder, relationship obsessive-compulsive disorder (ROCD), Scrupulosity, Primarily obsessional obsessive compulsive disorder, sexual obsession, Akathisia (including, without limitation, chronic, acute, Pseudoakathisia, Tardive akathisia, withdrawal or “rebound” akathisia), Restless legs syndrome, motor restlessness, periodic limb movement disorder (PLMD), periodic limb movements in sleep (PLMS), Sydenham's chorea, chorea, dystonia, Hypnic jerk, twitching, spasms, Tetanus, tetanus muscle spasms, tetanized state, Myoclonus, myoclonic seizure, Action myoclonus, Palatal myoclonus, Middle ear myoclonus, Spinal myoclonus, Stimulus-sensitive myoclonus, Sleep myoclonus, Cortical reflex myoclonus, Essential myoclonus, myoclonic epilepsy, Juvenile myoclonic epilepsy, Progressive myoclonus epilepsy (PME, including, without limitation, Dentatorubral-pallidoluysian atrophy, Unverricht-Lundborg disease, MERRF syndrome, Lafora disease), Reticular reflex myoclonus, Myoclonic epilepsy, diaphragmatic flutter, automatism, status epilepticus, Epilepsia partialis continua, Complex partial status epilepticus, epilepsy, epileptic seizure, simple partial seizure, complex partial seizure, generalized epilepsy, generalized seizure (including, without limitation, tonic-clonic, tonic, clonic, myoclonic, absence (including typical absence and atypical absence), atonic seizure), focal epilepsy, focal seizure, focal/partial seizure (including, without limitation, Simple partial seizure and Complex partial seizure), focal aware seizure, focal impaired awareness seizure, generalised epilepsy, temporal lobe epilepsy (including, without restriction, mesial temporal lobe epilepsy {MTLE} and lateral temporal lobe epilepsy {LTLE}), Frontal lobe epilepsy, Rolandic epilepsy, Nocturnal epilepsy, Nocturnal frontal lobe epilepsy, Autosomal dominant nocturnal frontal lobe epilepsy (ADNFLE), Generalized epilepsy with febrile seizures plus (GEFS+), Panayiotopoulos syndrome, epileptic fit, reflex epilepsy, reflex seizure, absence seizure (including, without limitation, childhood absence epilepsy, epilepsy with myoclonic absences, juvenile absence epilepsy, juvenile myoclonic epilepsy, Jeavons syndrome {eyelid myoclonia with absences}, genetic generalised epilepsy with phantom absences), complex partial seizure, atonic seizure, generalized tonic-clonic seizure, tonic-clonic seizure, extrinsic stimulus epilepsy, intrinsic stimulus epilepsy, photosensitive epilepsy, musicogenic epilepsy, thinking epilepsy, eating epilepsy, seizure(s), Febrile seizure, nerve agent induced seizure, Dravet syndrome (sometimes modest hyperthermic stressors like physical exertion or a hot bath can provoke seizures in affected individuals), acute symptomatic seizure, seizure-related disorder, drug related seizure, paroxysmal depolarizing shift, Ohtahara syndrome, Epilepsy in females with mental retardation, Rasmussen's encephalitis, Epilepsy syndrome, benign rolandic epilepsy, childhood absence epilepsy, absence epilepsy, juvenile myoclonic epilepsy, epileptic encephalopathies, Lennox-Gastaut syndrome, West syndrome (Epileptic spasms), Doose syndrome (Myoclonic astatic epilepsy, MAE), Lennox-Gestaut syndrome, pseudo-Lennox Gastaut syndrome (atypical benign partial epilepsy), Benign familial neonatal epilepsy, Benign occipital epilepsy of childhood, familial neonatal convulsions, Febrile infection-related epilepsy syndrome, interictal dysphoric disorder, euphoria sclerotic, psychogenic non-epileptic seizure, non-epileptic seizure, gelastic seizure, convulsion(s), migraine, status migrainosus, tension headache, headache, Hypnic headache, hiccups, intractable hiccups, thumps in equines, Postural orthostatic tachycardia syndrome (POTS), Pheochromocytoma, agony, pain, chronic pain, acute pain, pain due to disease/injury, neuropathic pain, fibromyalgia, postherpetic neuralgia, phantom pain, referred pain, back pain, lower back pain, pelvic pain, cancer associated pain, chemotherapy associated pain, Diabetic neuropathy, small fiber peripheral neuropathy, Mononeuritis multiplex, Wartenberg's migratory sensory neuropathy, Breakthrough pain, idiopathic pain, polyneuropathy, Neuritis, Mononeuropathy, Polyradiculoneuropathy, Radial neuropathy, neuropathy, visceral pain, Burning feet syndrome, Tarsal tunnel syndrome, Carpal tunnel syndrome, Guyon's canal syndrome, Cubital Tunnel Syndrome, Repetitive strain injury, Sciatica, Neurofibromatosis, Ulnar nerve entrapment, Erythromelalgia, Paroxysmal extreme pain disorder, Proctalgia fugax, dysesthesia, scalp dysesthesia, dysesthetic burning, hyperesthesia, hyperalgesia, Opioid-induced hyperalgesia, hyperpathia, allodynia, pain response from stimuli which do not normally provoke pain, Complex regional pain syndrome (said to be most painful condition known to man), Radiculopathy, neuralgia (including, without restriction, intercostal neuralgia, trigeminal neuralgia, atypical trigeminal neuralgia, glossopharyngeal neuralgia, occipital neuralgia, postherpetic neuralgia), ciguatera poisoning, irritable bowel syndrome (IBS), interstitial cystitis (IC), temporomandibular joint disorder, acute intermittent porphyria, Porphyria, Acute porphyria (including, without limitation, acute intermittent porphyria {AIP}, variegate porphyria {VP}, aminolevulinic acid dehydratase deficiency porphyria {ALAD}, hereditary coproporphyria {HCP}, drug induced), Chronic porphyria (including, without limitation, X-linked dominant protoporphyria {XLDPP}, congenital erythropoietic porphyria {CEP}, porphyria cutanea tarda {PCT}, and erythropoietic protoporphyria {EPP}), cutaneous porphyria, Porphyria cutanea tarda, allergy, allergic reaction, anaphylaxis, anaphylactic shock, hives, asthma, allergic rhinitis, rhinitis, urticaria, contact dermatitis, cough, sore throat, esophageal reflux disease, heartburn, chest pain, Esophageal motility disorder, Nutcracker esophagus, diseases involving gastrointestinal motility, Peptic ulcer disease, esophageal spasm, angina, itchiness, Pruritus, severe pruritus, Prurigo, Pruritic skin condition, chronic itch, eczema, pruritus in eczema, neuropathic itch, neurogenic itch, itchiness due to atopic dermatitis and/or lichen simplex chronicus, peripheral sensitization, central sensitization, sensory perception of absent stimuli, too much sensory stimulation, sensory stimulation brings discomfort, Neuromyotonia, Peripheral nerve hyperexcitability, Morvan's syndrome, Benign fasciculation syndrome, Cramp fasciculation syndrome, hyperhidrosis, undifferentiated somatoform disorder, somatoform disorder, somatic symptom disorder, conversion disorder, functional neurological symptom disorder, severe nausea and/or vomiting, severe nausea/emesis, peripheral neuropathy, chemotherapy-induced peripheral neuropathy, chemotherapy-induced nausea and vomiting (CINV), radiation therapy-induced nausea and vomiting (RINV), postnarcotic nausea, hyperemesis gravidarum, morning sickness, Cyclic vomiting syndrome, retching/dry heaving, Urinary incontinence, enuresis, nocturnal enuresis, tail chasing, reduce urine spraying/marking behavior, benzodiazepine withdrawal syndrome, barbituate withdrawal syndrome, Neuroleptic discontinuation syndrome, drug withdrawal discomfort/pain/symptoms, drug use disorder, alcohol use disorder, opoid use disorder, amphetamine use disorder, cocaine use disorder, alcohol withdrawal syndrome/symptoms, delirium tremens, opoid withdrawal syndrome/symptoms, drug craving, drug addiction, drug dependence, polysubstance dependence, drug overdose, smoking, tobacco (nicotine) addition, tobacco (nicotine) withdrawal symptoms, alcoholism, addiction, opoid addiction, cocaine/crack addiction, addictive behaviour, addictive personality, behavioural addiction, internet/computer/computer game/social media/media addiction, exercise addiction, compulsive behaviour (e.g. {non-limiting} checking, counting, washing, repeating), anti-social behaviour, criminality, sexual compulsion, impulsive sexual behaviour, compulsive buying, gambling addiction, sex related addiction, sexual urge, hunger, eating desire/compulsion, eating disorder, polyphagia, overeating, binge eating disorder, compulsive overeating, insatiable/excessive appetite, bulimia nervosa, anorexia nervosa, substance abuse, substance-induced delirium, substance-induced psychosis, substance-induced mood disorder, drug overdose, vertigo, motion sickness, seasickness, mental/nervous breakdown, Autism spectrum disorder, neurological disorder, cognitive disorder, mental disorder, mental health disorder, mental health condition involving impaired or altered neural plasticity, mood disorder, mental disorder disclosed in Diagnostic and Statistical Manual of Mental Disorders, Fifth Edition (DSM-5) or a later edition, a mental/behavioural disorder disclosed by the International Classification of Diseases (ICD) in ICD-10 Chapter V: Mental and behavioural disorders (World Health Organisation, WHO);
[0294] (xxiii) disease or disorder or condition or pathology or unwanted/undesirable effect/action/behaviour treatable/ameliorated/prevented/combated, in totality or in part (e.g. along with surgery), by anaesthesia, pre-anaesthesia, post-anaesthesia, hypoesthesia, hypoactivity, sedation, coma, tranquilization, behavioural submission, muscle relaxation, hibernation, artificial hibernation, torpor, synthetic torpor, stasis, suspended animation (e.g. used during spaceflight because e.g. reduces ionizing radiation damage to subject); compound(s) administration to confer one or more of sedation, anaesthesia, hypoactivity, hibernation, torpor, suspended animation, life extension in a subject;
[0295] (xxiv) hyperproliferative/hyperplasia disorder, non-cancerous proliferative disorder, hyperproliferative autoimmune disorder, hyperplasia, epidermal hyperplasia, dysplasia (e.g. epithelial dysplasia), nodule(s), wart(s), papilloma(s), squamous cell papilloma, genital wart(s), condyloma(s), condyloma acuminatum, cyst(s), polyp(s) {including, without restriction, digestive, colorectal, endometrial, cervical, nasal, laryngeal, inflammatory fibroid polyp [s])}, inherited/hereditary (including, without restriction, Familial adenomatous polyposis, Peutz-Jeghers syndrome, Turcot syndrome, Juvenile polyposis syndrome, Cowden disease, Bannayan-Riley-Ruvalcaba syndrome {Bannayan-Zonana syndrome}, Gardner's syndrome) and non-inherited (non-restrictive e.g. Cronkhite-Canada syndrome) polyposis syndrome, benign tumour, adenoma, organ enlargement by hyperplasia, Cushing's disease (enlarged adrenal cortex by hyperplasia), congenital adrenal hyperplasia, hyperplasia of breast, atypical ductal hyperplasia, intraductal papillomatosis, fibroadenomas, fibrocystic changes, hemihyperplasia, focal epithelial hyperplasia, sebaceous hyperplasia, sebaceous adenoma, intimal hyperplasia, unwanted/undesirable smooth muscle cell proliferation, smooth muscle cell hyperplasia, intimal smooth muscle cell hyperplasia, neointimal hyperplasia, proliferative vascular disorders, stenosis, stenosis because of cellular proliferation, vaginal stenosis, stenosis in a blood vessel, vessel stenosis, aortic valve stenosis, lessoned patency of a blood vessel, stenosis in a blood vessel because of cellular proliferation, vascular occlusion, restenosis, restenosis in a blood vessel that has been implanted with a stent, in-stent restenosis, post-angioplasty restenosis, systemic sclerosis, cirrhosis of the liver, adult respiratory distress syndrome, idiopathic cardiomyopathy, lupus erythematosus, retinopathy (e.g. diabetic retinopathy and/or other retinopathy[y/ies]), cardiac hyperplasia, fibrosis, pulmonary fibrosis, idiopathic pulmonary fibrosis, fibromatosis, neurofibromatosis, renal interstitial fibrosis, Cowden syndrome, hamartoma(s), choristoma(s), hemangioma(s), lymphangioma(s), rhabdomyoma(s), lymphangiomatosis, cystic hygroma, trichilemmoma, sarcoidosis, neurosarcoidosis, aggressive fibromatosis, desmoid tumour(s), unwanted/undesirable skin cell proliferation, hyperproliferative skin disorder, psoriasis (including, without restriction, plaque, guttate, inverse, pustular, napkin, seborrheic-like, nail, scalp and erythrodermic psoriasis), psoriatic arthritis, dactylitis, seborrhoeic dermatitis, dandruff, eczema, atopic dermatitis, rosacea, reactive arthritis (Reiter's syndrome), pityriasis rubra pilaris, hyperproliferative variants of disorders of keratinization (e.g., without restriction, actinic keratosis, senile keratosis, keratosis pilaris, seborrheic keratosis), scleroderma, benign prostatic hyperplasia, prostate enlargement, endometrial hyperplasia, atypical endometrial hyperplasia, benign endometrial hyperplasia, adenomyosis, atypical polypoid adenomyoma, endometriosis, endometriosis of ovary (endometrioma), endometrial polyp(s), polycystic ovary syndrome, ovarian cyst(s), cervical polyp(s), uterine fibroid(s), uterine hyperplasia, proliferative smooth muscle disorders (such as intimal smooth muscle cell hyperplasia, which can lead to blockage in, for non-limiting example, the urethra, the bile duct, the airway, the bronchial airways of the lung and/or a blood vessel(s), particularly following biologically or mechanically mediated tissue injury), restenosis (to illustrate, without restriction, that associated with balloon angioplasty and/or insertion of a stent, incidentally wherein a “drug-eluting balloon”/“drug-eluting stent”/“drug-eluting medical device” with at least one compound of/in this disclosure is herein contemplated);
[0296] (xxv) Tumour Associated Macrophages (TAMs) or any macrophage associated disease or disorder such as, without limitation, Macrophage Activation Syndrome (MAS), HIV, AIDS, HIV-associated neurocognitive disorders (HAND), HIV-associated dementia complex (HAD), AIDS dementia, HIV-associated chronic inflammation, HIV associated peripheral neuropathy, HIV associated cancers, AIDS-defining cancers, non-AIDS defining cancers, HIV infection/transmission/drug resistance (use for HIV pre- and/or post-exposure prophylaxis [PEP] e.g. after needlestick injury and/or sex with an HIV infected person [s], e.g. to reduce the probability of mother to baby HIV transmission during pregnancy/birth/breast feeding), any disease in which the pathogen(s) hides from the immune system in macrophages including, without limitation, HIV (HIV virus can lay latent in macrophages during antiretroviral therapy [ART], wherein HIV virus becomes undetectable in blood, and then repopulate the virus in blood when ART is interrupted or discontinued; HIV virus recombines and mutates in macrophages, which is a drive to HIV drug resistance), Mycobacterium tuberculosis (causes tuberculosis), Leishmania parasite (causes Leishmaniasis), Chikungunya virus (causes Chikungunya), Legionella pneumophila (causes Legionnaires' disease), adenoviruses, T. whipplei (causes Whipple's Disease), Brucella spp. (causes brucellosis), Staphylococcus aureus, Ebola virus, Hepatitis B virus, Hepatitis C virus, influenza virus strains, dengue virus, bacteria and antibiotic resistant bacteria (so to stress, treatment of antibiotic resistant bacteria is taught), any disease or condition in which activated macrophages are unwanted or undesirable, any disease/disorder partially/completely driven by, or made worse, by activated macrophages (or similar activated cell type e.g. pancreatic islet macrophages/Langerhans cells/dendritic cells/monocytes/histiocytes/Hofbauer cells/Kupffer cells/phagocytes/microglia/epithelioid cells/osteoclasts/macrophage like cells/cells of the mononuclear phagocyte system, and/or any cell type(s) of the innate immune system and/or of the monocyte lineage, especially inducible nitric oxide synthase (iNOS) and/or iNOS2 expressing and/or NO producing cells {e.g. monocyte-derived inflammatory dendritic cells}, any disease in which the pathogen(s) hides from the immune system in monocytes including, without limitation, Human Cytomegalovirus (HCMV), disease/disorder caused by a pathogen(s) [non-limiting e.g. e.g. Plasmodium falciparum {which can cause cerebral malaria}, e.g. Streptococcus pneumonia {which can cause bacterial meningitis} that drives macrophages/microglia and/or another cell of the mononuclear phagocyte system to drive pathology (e.g. inflammation);
[0297] (xxvi) virus/pathogen neuroinvasion via macrophage(s), as used for non-limiting example by HIV, Heptatitis C virus, SARS coronavirus, coronavirus;
[0298] (xxvii) neurocognitive or neurodegenerative diseases/disorders, for non-limiting example those caused by a virus;
[0299] (xxviii) virus/pathogen transmission from mother to fetus/baby via macrophage(s) as used for non-limiting example by zika (via Hofbauer cells) and HIV (macrophages in breast milk);
[0300] (xxix) acute or chronic or systemic inflammation or any inflammatory disease/disorder/syndrome or any autoinflammatory disease/disorder/syndrome or any autoimmune disease/disorder/syndrome;
[0301] (xxx) acute inflammation, chronic inflammation, systemic inflammation, inflammation because of infection or foreign bodies or injury or chemical or toxin or drug or stress or frostbite or burn or ionising radiation or surgery, inflammatory diseases/disorders/syndromes, Macrophage Activation Syndrome (MAS), autoinflammatory diseases/disorders/syndromes, age-related chronic inflammatory diseases (“inflammaging”), autoimmune diseases/disorders/syndromes, diseases/disorders of the innate immune system, sore throat, sore throat associated with cold or flu or fever, high-intensity exercise associated inflammation, inflammatory response to a virus/coronavirus infection (non-limiting e.g. SARS-COV-2), ulcerative colitis, inflammatory bowel disease (IBD), irritable bowel syndrome (IBS), rheumatoid arthritis, osteoarthritis, inflammatory osteoarthritis, psoriatic arthritis, atopic dermatitis, allergic airway inflammation, asthma, inflammation associated depression, neuroinflammation, neuropathic pain, exercise-induced acute inflammation, atherosclerosis, allergy, hay fever, anaphylaxis, inflammatory myopathies, drug-induced inflammation, systemic inflammatory response syndrome, sepsis-related multiple organ dysfunction/multiple organ failure, microbial infection, acute brain/lung/hepatic/renal injuries, lung inflammation, acute lung injury (ARDS), acne vulgaris, celiac disease, celiac sprue, chronic prostatitis, colitis, autoimmune hemolytic anemia, diverticulitis, glomerulonephritis, proliferative glomerulonephritis, membranous nephropathy, minimal change nephrotic syndrome, hidradenitis suppurativa, hypersensitivities, interstitial cystitis, Mast Cell Activation Syndrome, mastocytosis, otitis, pelvic inflammatory disease (PID), endometritis, reperfusion injury, rheumatic fever, rhinitis, sarcoidosis, transplant rejection, parasitosis, eosinophilia, type III hypersensitivity, ischaemia, chronic peptic ulcer, tuberculosis, Crohn's disease, hepatitis, chronic active hepatitis, immune hepatitis, alcoholic hepatitis, chronic viral hepatitis, ankylosing spondylitis, diverticulitis, fibromyalgia, systemic lupus erythematous (SLE), Alzheimer's disease, Parkinson's disease, neurodegenerative disease, cardiovascular disease, chronic obstructive pulmonary disease, bronchitis, acute bronchitis, bronchiectasis, bronchopneumonia, obliterative bronchiolitis, appendicitis, acute appendicitis, bursitis, cystitis, dermatitis, encephalitis, HIV encephalitis, gingivitis, meningitis, infective meningitis, myelitis, nephritis, neuritis, periodontitis, chronic periodontitis, phlebitis, prostatitis, RSD/CRPS, rhinitis, sinusitis, chronic sinusitis, tendonitis, testiculitis, tonsillitis, urethritis, vasculitis, respiratory bronchiolitis-associated interstitial lung disease and desquamative interstitial pneumonia, pneumonia, interstitial lung disease, Löfgren syndrome, Heerfordt syndrome, monocytosis, liver fibrosis, steatohepatitis, nonalcoholic steatohepatitis, silicosis, histiocytoses, Langerhans' cell histiocytosis, haemophagocytic lymphohistiocytosis, pulmonary langerhans cell histiocytosis, obesity, type II diabetes, type I diabetes, gout, pseudogout, Chron's disease, organ transplant rejection, epidermal hyperplasia, chronic fatigue syndrome, graft versus host disease (GvHD), transplant rejection, lymphadenopathy, rheumatoid arthritis (RA), osteoarthritis (OA), inflammatory osteoarthritis, lupus, multiple sclerosis (MS), myocarditis, uveitis, CNS disease(s), inflammation aspect to a CNS disease(s), hypothalamic inflammation, dementia, glaucoma, progressive glaucoma, amyloid related/driven disease, lipid storage disease(s), fibrosis, nonalcoholic fatty liver disease (NAFLD), nonalcoholic steatohepatitis (NASH), cirrhosis, cirrhosis of the liver, alcoholic cirrhosis, nephropath(y/ies), lupus nephritis, immune nephritis, fibrotic disorder(s), cardiovascular disease, heart disease, atherosclerosis, vulnerable plaque, plaque formation, lipid containing macrophage related disease(s)/disorder(s)/malad(y/ies), macrophage foam cells, diabetes, type 1 diabetes, type 2 diabetes, insulin resistance, macrophage aspect to insulin resistance, obesity, obesity associated inflammation, macrophage accumulation/large numbers of macrophages in adipose tissue (e.g. associated with obesity), granuloma(s), granulomatous diseases, sarcoidosis (including, without limitation, Annular sarcoidosis, Erythrodermic sarcoidosis, Ichthyosiform sarcoidosis, Hypopigmented sarcoidosis, Löfgren syndrome, Lupus pernio, Morpheaform sarcoidosis, Mucosal sarcoidosis, Neurosarcoidosis, Papular sarcoid, Scar sarcoid, Subcutaneous sarcoidosis, Systemic sarcoidosis, Ulcerative sarcoidos), neurosarcoidosis, pulmonary sarcoidosis, interstitial lung disease, pulmonary fibrosis, pulmonary tuberculosis, immune reconstitution syndrome of HIV, Jarisch-Herxheimer reaction, sepsis, Paget's disease of bone, osteolysis, monocytosis, histiocytosis, X-type histiocytoses, non-X histiocytoses, Langerhans cell histiocytosis, non-Langerhans-cell histiocytosis, malignant histiocytosis, malignant histiocytic disorders, histiocytomas, histiocytic lymphoma, hemophagocytic syndrome, hemophagocytic lymphohistiocytosis, lymphohistiocytosis, diffuse histiocytic sarcoma, Rosai-Dorfman disease, gliosis, Bergmann gliosis, Chronic Obstructive Pulmonary Disease (COPD), chronic inflammatory lung disease, recurrent fever syndrome (which can be hereditary or acquired, optionally characterized by recurrent fever associated with rash, serositis, lymphadenopathy and musculoskeletal involvement), familial mediterranean fever (FMF), TNF receptor-associated periodic syndrome (TRAPS), Hyperimmunoglobulinemia D with recurrent fever syndrome (HIDS), cryopyrin associated periodic syndrome (CAPS), Blau syndrome, Majeed syndrome, deficiency of interleukin-1 receptor antagonist (DIRA), mevalonate kinase deficiency, pyogenic-arthritis-pyoderma gangrenosum and acne syndrome (PAPA), periodic fever aphthous stomatitis pharyngitis adenitis (PFAPA) syndrome, Behcet's disease, Still's disease, Crohn's disease, Schnitzler's syndrome, Sweet's syndrome, NLRP12-associated autoinflammatory disorders, deficiency of interleukin-1 receptor antagonist (DIRA), pyoderma gangrenosum, cystic acne, aseptic arthritis, periodic Fever Associated with mevalonate kinase deficiency (hyperimmunoglobulin D Syndrome), Pyogenic Arthritis Pyoderma Gangrenosum Acne (PAPA) syndrome, Periodic Fever Aphthous Stomatitis, Pharyngitis and Adenopathy (PFAPA) syndrome, Adult-Onset Still's Disease (AOSD), Systemic Juvenile Idiopathic Arthritis (sJIA), Chronic Recurrent Multifocal Osteomyelitis (CRMO), Synovitis Acne Pustulosis Hyperostosis Osteitis (SAPHO) syndrome, Cryopyrin associated Periodic Syndrome (CAPS), Familial cold auto inflammatory syndrome (FCAS), Muckle-Wells syndrome (MWS), Familial cold urticarial, Neonatal onset multisystemic inflammatory disorder (NOMID), hereditary Periodic Fever Syndromes, Periodic Fever Syndromes, systemic autoinflammatory diseases, Addison's disease, Agammaglobulinemia, Alopecia areata, Amyloidosis, Ankylosing spondylitis, Anti-GBM/Anti-TBM nephritis, Antiphospholipid syndrome, autoimmune angioedema, autoimmune dysautonomia, autoimmune encephalomyelitis, autoimmune hepatitis, autoimmune hemolytic anemia, autoimmune inner ear disease (AIED), autoimmune myocarditis, autoimmune pancreatitis, autoimmune retinopathy, autoimmune urticaria, axonal & neuronal neuropathy (AMAN), Baló disease, Behcet's disease, benign mucosal pemphigoid, Bullous pemphigoid, Castleman disease (CD), Celiac disease, Chagas disease, chronic inflammatory demyelinating polyneuropathy (CIDP), chronic recurrent multifocal osteomyelitis (CRMO), Churg-Strauss, Cicatricial pemphigoid, Cogan's syndrome, cold agglutinin disease, congenital heart block, coxsackie myocarditis, CREST syndrome, Berger's disease, dermatitis herpetiformis, dermatomyositis, Devic's disease (neuromyelitis optica), discoid lupus, Dressler's syndrome, endometriosis, eosinophilic esophagitis (EoE), eosinophilic fasciitis, erythema nodosum, essential mixed cryoglobulinemia, Evans syndrome, fibromyalgia, fibrosing alveolitis, giant cell arteritis (temporal arteritis), giant cell myocarditis, glomerulonephritis, proliferative glomerulonephritis, membranous nephropathy, minimal change nephrotic syndrome, Goodpasture's syndrome, granulomatosis with polyangiitis, Graves' disease, Guillain-Barre syndrome, Hashimoto's thyroiditis, hemolytic anemia, immune hemolytic anemia, Henoch-Schonlein purpura (HSP), Herpes gestationis or pemphigoid gestationis (PG), hypogammalglobulinemia, IgA Nephropathy, IgG4-related sclerosing disease, Immune thrombocytopeniaurpura (ITP), Inclusion body myositis (IBM), Interstitial cystitis (IC), juvenile arthritis, juvenile diabetes (Type 1 diabetes), juvenile myositis (JM), Kawasaki disease, Multisystem Inflammatory Syndrome in Children (MIS-C), Lambert-Eaton syndrome, Leukocytoclastic vasculitis, Lichen planus, Lichen sclerosus, Ligneous conjunctivitis, Linear IgA disease (LAD), Lupus, Lyme disease chronic, Meniere's disease, Microscopic polyangiitis (MPA), Mixed connective tissue disease (MCTD), Mooren's ulcer, Mucha-Habermann disease, Multiple sclerosis, Myasthenia gravis, Myositis, Narcolepsy, Neuromyelitis optica, Neutropenia, Ocular cicatricial pemphigoid, Optic neuritis, Palindromic rheumatism (PR) PANDAS, Paraneoplastic cerebellar degeneration (PCD), Paroxysmal nocturnal hemoglobinuria (PNH), Parry Romberg syndrome, Pars planitis (peripheral uveitis), Parsonnage-Turner syndrome, Pemphigus, peripheral neuropathy, perivenous encephalomyelitis, Pernicious anemia (PA), POEMS syndrome, Polyarteritis nodosa, Polyglandular syndromes type I, II, III, Polymyalgia rheumatica, Polymyositis, Postmyocardial infarction syndrome, Postpericardiotomy syndrome, Primary biliary cirrhosis, Primary sclerosing cholangitis, Progesterone dermatitis, Psoriasis, Psoriatic arthritis, Pure red cell aplasia (PRCA), Pyoderma gangrenosum, Raynaud's phenomenon, Reactive arthritis, Reflex sympathetic dystrophy, Relapsing polychondritis, Restless legs syndrome (RLS), Retroperitoneal fibrosis, Rheumatic fever, Rheumatoid arthritis, rheumatic arthritis, Sarcoidosis, Schmidt syndrome, Scleritis, Scleroderma, Sjogren's syndrome, Sperm & testicular autoimmunity, Stiff person syndrome (SPS), Subacute bacterial endocarditis (SBE), Susac's syndrome, Sympathetic ophthalmia (SO), Takayasu's arteritis, Temporal arteritis/Giant cell arteritis, Thrombocytopenia purpura (TTP), Tolosa-Hunt syndrome (THS), Transverse myelitis, Type 1 diabetes, Ulcerative colitis (UC), Undifferentiated connective tissue disease (UCTD), Uveitis, Vasculitis, Vitiligo, Wegener's granulomatosis (or Granulomatosis with Polyangiitis (GPA)), idiopathic thrombocytopenia purpura, splenomegaly, systemic lupus erythematosus, lupus erythematosus, dermatomyositis, Sjorgren syndrome;
[0302] (xxxi) Systemic inflammatory response syndrome, cytokine release syndrome, cytokine storm, immune reaction to a drug(s) or therapy(s), immune reaction to an immune activating drug(s) or agent(s) or treatment(s) or intervention(s), immune reaction to immunotherapy and/or immune-oncology and/or immunomodulatory drug(s) and/or treatment(s), adverse reaction to adoptive T-cell therapy(s), adverse reaction to a chimeric antigen receptor T-cell therapy(s) (CAR-T cell therapy(s)), adverse reaction to a immune checkpoint inhibitor(s), adverse reaction to monoclonal antibody drug(s), tumor lysis syndrome;
[0303] (xxxii) cancer and Graft Versus Host Disease (GVHD) in transplantation therapy in a cancer patient;
[0304] (xxxiii) cardiovascular diseases and conditions associated with thrombosis and/or the formation of atherosclerotic plaques and/or ischemia and/or ischemic conditions and/or associated conditions including, without limitation, ischemia-reperfusion injury, myocardial ischemia, ischemic heart disease, chronic stable angina pectoris, first or recurrent myocardial infarction (MI), congestive heart failure, an acute coronary syndrome, muscle cell damage, necrosis, cardiac arrhythmia(s), non-Q wave MI, unstable angina, high blood pressure, coronary artery disease, coronary arterial thrombosis, ischemic hypoxia, cyanosis, gangrene, acute limb ischemia, stroke, ischemic stroke, cerebral/brain ischemia, vascular dementia, ischemic sudden death, transient ischemic attack (TIA), thrombophlebitis, ischemic colitis, mesenteric ischemia, angina pectoris, ischemic heart disease, ischemic neuropathy, hypoxic-ischemic encephalopathy, cerebral hypoxia, brain hypoxia, ischemia resulting from vascular occlusion, cerebral infarction, stroke and related cerebral vascular diseases (including cerebrovascular accident and transient ischemic attack), muscle cell damage, necrosis, ventricular hypertrophy, ventricular enlargement (including dilated cardiac myopathy and heart failure), Prinzmetal's angina, peripheral occlusive arterial disease (e.g., peripheral arterial disease, intermittent claudication, critical leg ischemia, prevention of amputation, prevention of cardiovascular morbidity such as MI, stroke or death), pericardial effusion, constrictive pericarditis, thrombosis, thrombotic or thromboembolic conditions, circulatory disease caused by blood clot (i.e. diseases involving fibrin formation, platelet activation, and/or platelet aggregation), thrombotic or thromboembolic symptoms of thromboembolic stroke (including that resulting from atrial fibrillation or ventricular mural thrombus), arterial cardiovascular thromboembolic disorders, venous cardiovascular thromboembolic disorders, thromboembolic disorders in the chambers of the heart, venous thrombosis (including deep vein thrombosis), arterial thrombosis, cerebral thrombosis, cerebral arterial thrombosis, pulmonary embolism, cerebral embolism, kidney embolism, arterial embolism, thrombophilia, disseminated intravascular coagulation, restenosis, atrial fibrillation, atherosclerotic vascular disease, atherosclerotic plaque formation, atherosclerosis, atherosclerotic plaque rupture, peripheral arterial disease, coagulation syndromes, intermittent claudication, transplant atherosclerosis, vascular remodeling atherosclerosis, diabetic complications comprising retinopathy, nephropathy and neuropathy, thromboembolic consequenses of surgery, interventional cardiology or immobility, thromboembolic consequenses of medication (such as oral contraceptives, hormone replacement and heparin), thrombotic consequenses of atherosclerotic vascular disease and atherosclerotic plaque rupture leading to tissue ischemia, prevention of atherosclerotic plaque formation, transplant atherosclerosis, thrombotic or thromboembolic complications of surgery including interventional cardiology, thromboembolic complications of pregancy including fetal loss, thromboembolic consequences of thrombophilia (e.g., Factor V Leiden, and homocystinenimia), prothrombotic consequences and/or complications of cancer, prevention of thrombosis on artificial surfaces (such as stents, blood oxygenators, shunts, vascular access ports, vascular grafts, artificial valves, etc.), coagulopathies (e.g., disseminated intravascular coagulation), coagulation syndromes, vascular remodeling atherosclerosis, restenosis and systemic infection, Kasabach-Merritt syndrome, occlusion (e.g. after a bypass) and reocclusion (e.g., during or after percutaneous transluminal coronary angioplasty), thromboembolic disorders resulting from conditions including but not limited to atherosclerosis, surgery or surgical complications, prolonged immobilization, arterial fibrillation, congenital thrombophilia, cancer, diabetes, effects of medications or hormones, complications of pregnancy and thrombosis resulting from prosthetic valves or other implants, indwelling catheters, stents, cardiopulmonary bypass, hemodialysis, or other procedures in which blood is exposed to an artificial surface that promotes thrombosis, acute coronary syndrome selected from myocardial infarction, congestive heart failure, and cardiac arrhythmia; or
[0305] (xxxiv) diseases or disorders or conditions treatable/ameliorated/prevented/combated by conferring/maintaining blood vessel patency in a subject, which can be useful during interventional cardiology or vascular surgery including bypass grafting, arterial reconstruction, atherectomy, vascular graft and stent patency, organ, tissue and cell implantation and transplantation, preservation of host and/or graft tissue as related to organ transplantation;
[0306] wherein the method comprises administering to the subject an effective amount (e.g. a therapeutically effective amount) of at least one compound of at least one of Formula (I), (II), (III), (IV), (V), (VI), (VII), (VIII), [X], and/or a pharmaceutically-acceptable salt, solvate, hydrate or prodrug thereof, and/or a pharmaceutical/cosmetic composition(s) comprising at least one compound of at least one of Formula (I), (II), (III), (IV), (V), (VI), (VII), (VIII), [X], and/or a F₁F₀ ATP hydrolysis inhibitor(s) (that preferably inhibits F₁F₀ ATP synthesis less or, more preferably, not at all), and/or a compound(s)/composition(s) that reduces F₁F₀ ATP hydrolysis, optionally any peptide/protein/polynucleotide comprising {or consisting of} at least one amino acid/nucleotide sequence in the Sequence Listing component of this application {or sequence variant thereof and/or fragment/concatenated fragments thereof} and/or a pharmaceutical/cosmetic composition thereof; another aspect is a method of treating, ameliorating, preventing or combating any such disease or disorder by administering to a subject in need thereof a therapeutically effective amount of a compound(s) and/or composition(s) as described herein;
[0307] this disclosure further includes the use of one or more of a compound/composition disclosed herein for the manufacture of a medicament, optionally for treating one or more of the diseases/disorders/conditions listed in the list immediately above/aforementioned.

[0308] An aspect of this disclosure is a pharmaceutical composition comprising at least one compound, as described herein, (optionally a therapeutically/cosmetically effective amount) and one or more of a pharmaceutically-acceptable carrier, excipient, diluent.

[0309] An aspect of this disclosure is a compound(s) and/or composition(s) as described herein for use in a method of treatment of the human or animal body by therapy.

[0310] An aspect of this disclosure is a compound(s) and/or composition(s) as described herein administered to a subject topically or systemically or both.

[0311] Another aspect is the use of a compound(s) and/or composition(s) as described herein for the manufacture of a medicament for the treatment, amelioration, prevention or combating of any disease or disorder, optionally a disease or disorder mentioned or inferred herein.

[0312] This disclosure encompasses at least one compound of/in this disclosure, e.g. at least one compound of at least one of Formula (I), (II), (III), (IV), (V), (VI), (VII), (VIII), [X], and/or a pharmaceutically-acceptable salt, solvate, hydrate or prodrug thereof, and/or at least one pharmaceutical composition thereof, in co-therapy/co-administration (optionally conferring synergy) with one or more treatments and/or one or more compounds/compositions approved for human use by the United States Food and Drug Administration (FDA) and/or European Medicines Agency (EMA), optionally in the same pharmaceutical composition, or sold/distributed together, optionally in the same packaging, optionally wherein the FDA and/or EMA approved treatment(s) and/or compound(s) is for treating one or more of cancer, peripheral neuropathy, HIV, AIDS, viral infection, bacterial infection, optionally wherein zero or more of the FDA and/or EMA approved drugs co-administered are a cytochrome P450 enzyme (e.g. CYP2C9) substrate/inhibitor.

[0313] A compound(s) that inhibits F₁F₀ ATP hydrolysis, for example a compound(s) of Formula (I-V, VII-VIII), administered or self-administered to a subject, for use in preventing/ending their pregnancy/conception, optionally co-administered (optionally in a pharmaceutical composition) with another compound(s) or combination of compounds with this use, many of which are known to those of the art e.g. progestin, antiprogestin, estrogen etc. Taken after unprotected sex for example, with a later window of effectiveness than present emergency contraceptives. Preferably this use is restricted to the time during which ES cells exist in embryogenesis, which is early.

### Example (I)

### Summary of Formula (I)

[0314] This disclosure embodiment relates to compounds having the following formula: Formula (I)

[chemical structure]

[0315] or a pharmaceutically-acceptable salt, solvate, hydrate, or prodrug thereof, wherein: G1 is N or CH;
[0316] G4 is NH or CH₂;
[0317] G2 is N or CH;
[0318] G3 is sulphur(S) or oxygen (O) or selenium (Se) or CH₂ and R1 is absent and r is 0; or
[0319] G3 is nitrogen (N), or CH or phosphorus (P) and R1 is present;
[0320] example embodiments include

[chemical structure]

[0321] L^{M}, L^{N}, L^{U}, L^{T}, L^{W}, L^{P} and L^{R} are each independently selected from a single bond, O, S, Se, NR^{V}, PR^{V}, BR^{V}, C(R^{V})₂ or Si(R^{V})₂, wherein each RY is independently selected from hydrogen, deuterium, halogen (e.g. F), alkyl, or substituted alkyl (non-limiting examples: CF₃, CCl₃), or deuterated alkyl (non-limiting example: CD₃), or aminoalkyl, or thioalkyl, or alkoxy, or O, or OH (hydroxyl), or halogen, or haloalkyl, or haloalkoxy;
[0322] m, n, u, t, w, p and r are each independently selected from 0, 1, 2, 3 and 4;
[0323] L is independently at each point of its use alkyl, or substituted alkyl (non-limiting examples: CF₃, CCl₃), or deuterated alkyl (non-limiting example: CD₃), or aminoalkyl, or thioalkyl, or alkoxy, or halogen, or haloalkyl, or haloalkoxy, or hydroxyalkyl or any atom or isotope permitted by valence (including any accompanying hydrogen(s)/deuterium(s) by valence e.g. (non-limiting) OH, NH₂, SH, SiH₃, PH₂, BH₂ etc.) including, without limitation, La, Ti, Ce, V, Ta, Cr, Mo, Mn, Fe, Ru, Os, Co, Pd, Pt, Cu, Ag, Au, Zn, B, Al, Ga, C, Si, N, P, As, Sb, Bi, O, S, Se, F, Cl, Br, I, Hg;
[0324] R₁ is absent, Rₑₓₜᵣₐ, R₃, hydrogen, deuterium, cyano, aryl, heteroaryl, —SO₂R₈, —C(═O)R₉, —C(═CH₂)R₉, —C(—OH)R₉, —C(—SH)R₉, —C(—SeH)R₉, —C(—OL)R₉ (wherein L defined earlier), —C(═S)R₉, —C(═Se)R₉, —C(═NH)R₉, C(═PH)R₉, —S(═O)R₉, —C(═N—OH)R₉, —C(—N═O)R₉, —C(—P═O)R₉, —C(═N—O—CH₃)R₉, -(L^{J})ⱼR₉, —C(═R^{D})-(L^{J})ⱼ-R₉, -(L^{J})ⱼ-C(═R^{D})—R₉, or

[chemical structure]

[0325] R^{D} is O, S, Se, NH or PH;
[0326] L^{J} is selected from a single bond, O, S, NR^{J} or C(R^{J})₂, wherein each R^{J} is independently selected from hydrogen, deuterium, halogen (e.g. F), alkyl, or substituted alkyl (non-limiting examples: CF3, CCl₃), or deuterated alkyl (non-limiting example: CD3), or aminoalkyl, or thioalkyl, or alkoxy, or halogen, or haloalkyl, or haloalkoxy;
[0327] j is 0, 1, 2 or 3;
[0328] Rₑₓₜᵣₐ is selected from L (defined earlier), aryl, heteroaryl, cycloalkyl, heterocyclo, arylalkyl, (heterocyclo)alkyl, (heteroaryl)alkyl, alkyl, substituted alkyl, alkenyl, substituted alkenyl, alkylene, substituted alkylene, alkynyl, substituted alkynyl, alkoxy, thioalkyl, aminoalkyl, carbamyl, sulfonyl, sulfonamide, cycloalkyl, (cycloalkyl)alkyl, hydroxyalkyl, haloalkyl, haloalkoxy, alkoxyalkyl, morpholinylalkyl, acyl, alkoxycarbonyl, substituted amino;
[0329] R₂ is (i) independently hydrogen, L (defined earlier), alkyl, or substituted alkyl,
   [0330] or (ii) taken together with R3 forms a heterocyclo;
[0331] R₃ is (i) independently R₁, alkyl, substituted alkyl, L (defined earlier), alkylthio, aminoalkyl, carbamyl, B^{B}-aryl, B^{B}-heterocyclo, B^{B}-heteroaryl, or B^{B}-cycloalkyl, or (ii) taken together with R₂ forms a heterocyclo;
[0332] Z is heteroaryl;
[0333] Z^{Z} is aryl, heteroaryl, cycloalkyl or heterocyclo;
[0334] B^{B} is a bond, C₁₋₄alkylene, C₂₋₄alkenylene, substituted C₁₋₄alkylene, substituted C₂₋₄alkenylene, —C(═O)NR₁₉—, —C₁₋₄alkylene-C(═O)N_{R19}—, or substituted C₁₋₄alkylene-C(═O)NR₁₉—;
[0335] R₄ at each occurrence is selected independently of each other R₄ from the group consisting of PH₂, OH, SH, halogen, alkyl, substituted alkyl, haloalkyl, nitro, cyano, haloalkoxy, OR₂₅, SR₂₅, NR₂₅R₂₆, NR₂₅SO₂R₂₇, SO₂R₂₇, SO₂NR₂₅R₂₆, CO₂R₂₆, C(═O)R₂₆, C(═)NR₂₅R₂₆, OC(═O)R₂₅, —OC(═O)NR₂₅R₂₆, NR₂₅C(═O)R₂₆, NR₂₅CO₂R₂₆, aryl, heteroaryl, heterocyclo and cycloalkyl;
[0336] R₈ is alkyl, substituted alkyl, aryl, or heteroaryl;
[0337] R₉ is —NR₁₀R₁₁, alkyl, substituted alkyl, alkoxy, alkylthio, cycloalkyl, aryl, heteroaryl, heterocyclo or —CO₂R₁₂;
[0338] R₁₀ and R₁₁, are (i) independently selected from hydrogen, alkyl, substituted alkyl, alkoxy, heterocyclo, cycloalkyl, aryl, and heteroaryl; or (ii) taken together form a heterocyclo or heteroaryl;
[0339] R₁₂ and R₁₉ are hydrogen or alkyl;
[0340] R₂₅ and R₂₆ are independently selected from hydrogen, alkyl, or substituted alkyl, or taken together form a heterocyclo or heteroaryl ring;
[0341] R₂₇ is alkyl or substituted alkyl, and
[0342] q is 0, 1, 2, or 3.

### Preferred Compounds of Formula (I)

[0343] Preferred methods are to use, and preferred compounds are, compounds with the following formula, or pharmaceutically-acceptable salts, solvates, hydrates or prodrugs thereof,

[chemical structure]

further preferred methods are to use, and preferred compounds are, compounds with the following formula, or pharmaceutically-acceptable salts, solvates, hydrates or prodrugs thereof,

[chemical structure]

and even more preferred methods are to use, and preferred compounds are, compounds with the following formula, or pharmaceutically-acceptable salts, solvates, hydrates or prodrugs thereof,

[chemical structure]

other preferred methods are to use, and preferred compounds are, compounds with the following formula, or pharmaceutically-acceptable salts, solvates, hydrates or prodrugs thereof,

[chemical structure]

further preferred methods are to use, and preferred compounds are, compounds with the following formula, or pharmaceutically-acceptable salts, solvates, hydrates or prodrugs thereof,

[chemical structure]

other preferred methods are to use, and preferred compounds are, compounds with the following formula, or pharmaceutically-acceptable salts, solvates, hydrates or prodrugs thereof,

[chemical structure]

other preferred methods are to use, and preferred compounds are, compounds with the following formula, or pharmaceutically-acceptable salts, solvates, hydrates or prodrugs thereof,

[chemical structure]

[0344] in which, in the preceding 7 structures shown:
[0345] L is hydrogen, or methyl, or alkyl, or hydroxyalkyl, or CF₃, or CD₃, or deuterium (D);
[0346] D is deuterium (enrichment, for example, exceeding 40% deuterium incorporation at shown position, and optionally at other positions also);
[0347] S symbolises the S stereoisomer, for example, in enantiomeric excess (ee) exceeding 70%;
[0348] R symbolises the R stereoisomer, for example, in enantiomeric excess (ee) exceeding 70% (following IUPAC naming rules the chiral carbon of the fluorine (F) analogue is labelled R rather than S, but note that the arrangement of which bond is up, bold wedge, and down, dashed, around the stereogenic carbon is the same as the preceeding structures labelled S at their chiral carbon, it is this molecule arrangement that is salient, and that is disclosed, rather than a mere label in a naming convention. This clarification won't be repeated at every place to which it applies in this disclosure, at every point at which there is an F in place of an H on the chiral carbon, or any other higher order of priority atom (by IUPAC rules), e.g. (non-limiting) any other halogen, because this clarification here itself is likely superfluous: all this is very clear to someone of the art. So, when there is said to be an enantiomeric excess (ee) in this disclosure in relation to this example embodiment, Formula (I), it applies to this molecular configuration, this arrangement of solid/dashed wedges, about the chiral carbon, whether this be S or R by IUPAC naming rules);
[0349] Z is triazolyl optionally substituted independently with one to two R₇ or imidazolyl optionally substituted independently with one to two R₇ and/or having fused thereto a benzene ring in turn optionally substituted independently with one to two R7;
[0350] R₁ is cyano or —C(═O)R₉;
[0351] R₂ is hydrogen, alkyl, or benzyl;
[0352] R₃ is aryl or arylalkyl optionally substituted independently with one or more groups selected from alkyl, halogen, trifluoromethyl, OCF₃, cyano, nitro, amino, hydroxy, methoxy;
[0353] R₄ is halogen, alkyl, trifluoromethyl, or OCF₃;
[0354] R₇ is alkyl, carbamyl or carbamylC₁₋₄alkyl;
[0355] R₉ is —NR₁₀R₁₁, alkyl, substituted alkyl, alkoxy, alkylthio, cycloalkyl, aryl, heteroaryl, heterocyclo or —CO₂R₁₂;
[0356] R₁₀ and R₁₁ are (i) independently selected from hydrogen, alkyl, substituted alkyl, alkoxy, heterocyclo, cycloalkyl, aryl, and heteroaryl; or (ii) taken together form a heterocyclo or heteroaryl;
[0357] R12 is hydrogen or alkyl; and
[0358] q is 0, 1, 2, or 3.

[0359] More preferred methods are to use, and preferred compounds are, compounds with the following formula, or pharmaceutically-acceptable salts, solvates, hydrates or prodrugs thereof,

[chemical structure]

other preferred compounds are those with the following formula, or pharmaceutically-acceptable salts, solvates, hydrates or prodrugs thereof,

[chemical structure]

and even more preferred are compounds having the following formula, or pharmaceutically-acceptable salts, solvates, hydrates or prodrugs thereof,

[chemical structure]

other preferred compounds are those with the following formula, or pharmaceutically-acceptable salts, solvates, hydrates or prodrugs thereof,

[chemical structure]

other preferred compounds are those with the following formula, or pharmaceutically-acceptable salts, solvates, hydrates or prodrugs thereof,

[chemical structure]

other preferred compounds are those with the following formula, or pharmaceutically-acceptable salts, solvates, hydrates or prodrugs thereof,

[chemical structure]

other preferred compounds are those with the following formula, or pharmaceutically-acceptable salts, solvates, hydrates or prodrugs thereof,

[chemical structure]

in which, for the preceding 7 structures shown:

[chemical structure]

and more preferably

[chemical structure]

[0360] z is

[chemical structure]

[0361] or

[chemical structure]

[0362] or
[0363] L is hydrogen, or methyl, hydroxyalkyl, or CF₃, or CD₃, or deuterium (D);
[0364] D is deuterium (enrichment, for example, exceeding 40% deuterium incorporation at shown position, and optionally at other positions also);
[0365] S symbolises the S stereoisomer, for example, in enantiomeric excess (ee) exceeding 70%;
[0366] A is nitrogen (N), or N⁺, or carbon;
[0367] E is absent, or alkyl, or substituted alkyl, or deuterated alkyl, or aminoalkyl, or thioalkyl, or alkoxy or any atom or isotope permitted by valence (including any accompanying hydrogens by valence e.g. (non-limiting) OH, NH₂, SH, SiH₃, PH₂ etc.), for example hydrogen, deuterium or fluorine;
[0368] Y is N, CH or CR_{7c};
[0369] R₁ is cyano or —C(═O)R₉;
[0370] R₂ is hydrogen or C₁₋₄alkyl;
[0371] R₄ is halogen, C₁₋₄alkyl, trifluoromethyl, or OCF₃;
[0372] R₇ₐ, R_{7b}, and R_{7c} are independently E (defined earlier), hydrogen, alkyl, carbamyl or carbamylC₁₋₄alkyl, or R₇ₐ and R_{7c} join to form an optionally substituted fused phenyl ring;
[0373] R₉ is —NR₁₀R₁₁, alkyl, substituted alkyl, alkoxy, alkylthio, cycloalkyl, aryl, heteroaryl, heterocyclo or —CO₂R₁₂;
[0374] R₁₀ and R₁₁ are (i) independently selected from hydrogen, alkyl, substituted alkyl, alkoxy, heterocyclo, cycloalkyl, aryl, and heteroaryl; or (ii) taken together form a heterocyclo or heteroaryl;
[0375] R₁₂ is hydrogen or alkyl;
[0376] R₂₃ is hydrogen, alkyl, hydroxyalkyl, or phenyl;
[0377] R₂₄ is (selected independently at each point of its use)alkyl, substituted alkyl, haloalkyl, halogen, trifluoromethyl, cyano, hydroxy, OCF₃, methoxy, phenyloxy, benzyloxy, cyano, or acyl, or two R₂₄ groups join to form a fused cycloalkyl or benzene ring;
[0378] q is 1 or 2;
[0379] x is 0, 1, or 2; and
[0380] y is 0, 1, 2, or 3.

[0381] More preferred methods are to use, and preferred compounds are, compounds with the following formula, or pharmaceutically-acceptable salts, solvates, hydrates or prodrugs thereof,

[chemical structure]

other preferred compounds are those with the following formula, or pharmaceutically-acceptable salts, solvates, hydrates or prodrugs thereof,

[chemical structure]

and even more preferred are compounds having the following formula, or pharmaceutically-acceptable salts, solvates, hydrates or prodrugs thereof,

[chemical structure]

other preferred compounds are those with the following formula, or pharmaceutically-acceptable salts, solvates, hydrates or prodrugs thereof,

[chemical structure]

other preferred compounds are those with the following formula, or pharmaceutically-acceptable salts, solvates, hydrates or prodrugs thereof,

[chemical structure]

other preferred compounds are those with the following formula, or pharmaceutically-acceptable salts, solvates, hydrates or prodrugs thereof,

[chemical structure]

other preferred compounds are those with the following formula, or pharmaceutically-acceptable salts, solvates, hydrates or prodrugs thereof,

[chemical structure]

in which, for the preceding 7 structures shown:

[chemical structure]

[0382] z is

[chemical structure]

[0383] or
[0384] L is hydrogen, or methyl, or hydroxyalkyl, or deuterium;
[0385] D is deuterium (enrichment, for example, exceeding 40% deuterium incorporation at shown position, and optionally at other positions also);
[0386] S symbolises the S stereoisomer, for example, in enantiomeric excess (ee) exceeding 70%;
[0387] R₁ is cyano or —C(═O)R₉;
[0388] R₄ is halogen, C₁₋₄alkyl, trifluoromethyl, or OCF₃;

[0389] R_{7c} is hydrogen or R₇ and R_{7c} join to form a fused benzene ring optionally substituted independently with C₁₋₄alkyl or —(CH₂)₁₋₂—NHC(═O)C₁₋₄alkyl,
[0390] R_{7b} is hydrogen, C₁₋₄alkyl, or —(CH₂)₁₋₂—NHC(═O)C₁₋₄alkyl;
[0391] R₉ is a) —NR₁₀R₁₁
[0392] b) C₁₋₈ alkyl optionally substituted independently with one to two of:
[0393] i) SR₁₃, OR₁₃, NR₁₃ₐR_{13b}, halogen, trifluoromethyl, CO₂R₁₃ₐ, and C(═O)NR₁₃ₐR_{13b};
[0394] ii) cycloalkyl optionally substituted with one to two groups independently selected from C(═O)H, C₁₋₄acyl, alkenyl, carbamyl, phenyl in turn optionally substituted with halogen;
[0395] iii) phenyl or napthyl optionally substituted with one to two groups independently selected from halogen, nitro, amino, alkyl, hydroxy, C₁₋₄alkoxy, or having fused thereto a five or six membered heterocyclo;
[0396] iv) pyridinyl, thiophenyl, furanyl, tetrahydrofuranyl, or azepinyl, optionally substituted with alkyl or having fused thereto a five to six membered carbocyclic ring optionally substituted with keto and/or C₁₋₄alkoxy;
[0397] c) C1-4alkoxy;
[0398] d) C1-4alkylthio;
[0399] e) CO2alkyl;
[0400] f) 3 to 6 membered cycloalkyl optionally having up to four substituents independently selected from alkyl, halogen, cyano, alkenyl, acyl, alkylthio, carbamyl, phenyl in turn optionally substituted with halogen; or having an aryl fused thereto;
[0401] g) phenyl optionally substituted with one to four (selected independently) of halogen, cyano, trifluoromethyl, nitro, hydroxy, C₁₋₄alkoxy, haloalkoxy, C₁₋₆alkyl, CO₂alkyl, SO₂alkyl, SO₂NH₂, amino, NH(C₁₋₄alkyl), N(C₁₋₄alkyl)₂, NHC(═O)alkyl, C(═O)alkyl, C₁₋₄ alkyl in turn optionally substituted with one to three (selected independently) of trifluoromethyl, hydroxy, cyano, phenyl, pyridinyl; and/or a five or six membered heteroaryl or heterocyclo in turn optionally substituted with keto or having a benzene ring fused thereto;
[0402] h) pyridinyl, thiazolyl, furanyl, thiophenyl, and pyrrolyl optionally substituted with one to two (selected independently) of halogen, alkyl, phenyl in turn optionally substituted with halogen and/or trifluoromethyl;
[0403] R₁₀ is hydrogen, alkyl, or alkoxy;
[0404] R₁₁ is alkyl, substituted alkyl, alkoxy, heterocyclo, cycloalkyl, aryl, or heteroaryl;
[0405] or R₁₀ and R₁₁, taken together form a heterocyclo or heteroaryl;
[0406] R₂₃ is hydrogen, alkyl, hydroxyalkyl, or phenyl;
[0407] R₂₄ is (selected independently at each point of its use)alkyl, halogen, trifluoromethyl, cyano, halogen, hydroxy, OCF₃, methoxy, phenyloxy, benzyloxy, cyano, or acyl, or two R₂₄ groups join to form a fused cycloalkyl or benzene ring;
[0408] q is 0, 1, or 2;
[0409] x is 0 or 1; and
[0410] y is 0, 1, or 2.

[0411] Most preferred are compounds as immediately defined above wherein, R1 is cyano or —C(═O)R₉; R₉ is optionally substituted phenyl or phenyl C₁₋₄alkyl; x is 0 or 1; and q and y are 1 or 2. For this preferred structure, further preferred is for its L group to be methyl. Alternatively preferred is for its L group to be deuterium, wherein the S stereoisomer is preferred.

[0412] A disclosure embodiment is for L on the chiral carbon to be alkyl, or substituted alkyl (non-limiting examples: CF₃, CCl₃), or deuterated alkyl (non-limiting example: CD₃), or aminoalkyl, or thioalkyl, or alkoxy, or halogen, or haloalkyl, or haloalkoxy, or hydroxyalkyl or any atom or isotope permitted by valence (including any accompanying hydrogen(s)/deuterium(s) by valence) except hydrogen at natural abundance. A disclosure embodiment is for L on the chiral carbon to be alkyl, substituted alkyl or any atom or isotope permitted by valence except hydrogen at natural abundance. An alternative disclosure embodiment is for L to be H.

### Methyl (or Metabolized Derivative Thereof) on the Chiral Carbon

[0413] In some embodiments, a compound according to the formula

[chemical structure]

or a pharmaceutically-acceptable salt, solvate, hydrate or prodrug thereof. With a compound of this formula, in some embodiments, there is an enantiomeric excess of enantiomer. In some embodiments, the S-enantiomer of the compound is in enantiomeric excess. In other embodiments, the R-enantiomer of the compound is in enantiomeric excess. To illustrate, for (non-limiting) example, with supporting experimental data herein, against some cancers, the S-enantiomer exerts more potent anti-cancer activity and is preferred for anti-cancer use, whilst against some other cancers, the R-enantiomer exerts more potent anti-cancer activity and is preferred for anti-cancer use, wherein in some embodiments both are independently trialed against a cancer (in vivo and/or ex vivo) to see which exerts the greater anti-cancer activity, wherein administration is subsequently delimited to the enantiomer, or sample with enantiomeric excess for that enantiomer, that is found to have greater anti-cancer activity against that particular cancer, and/or the racemate or a scalemate is administered, optionally with another compound(s) of this disclosure, or a pharmaceutically-acceptable salt, solvate, hydrate or prodrug thereof.

[0414] In some embodiments, the compound is a compound according to the formula

[chemical structure]

or a pharmaceutically-acceptable salt, solvate, hydrate or prodrug thereof, wherein S symbolises the S stereoisomer, for example, in enantiomeric excess (ee) exceeding 70%.

[0415] In some embodiments, the compound is a compound according to the formula

[chemical structure]

or a pharmaceutically-acceptable salt, solvate, hydrate or prodrug thereof, wherein R symbolises the R stereoisomer, for example, in enantiomeric excess (ee) exceeding 70%.

[0416] In some embodiments, the compound is a compound according to the formula

[chemical structure]

or a pharmaceutically-acceptable salt, solvate, hydrate or prodrug thereof.

[0417] In some embodiments, the compound is a compound according to the formula

[chemical structure]

or a pharmaceutically-acceptable salt, solvate, hydrate or prodrug thereof, wherein R symbolises the R stereoisomer, for example, in enantiomeric excess (ee) exceeding 70%.

[0418] In some embodiments, the compound is

[chemical structure]

or a pharmaceutically-acceptable salt, solvate, hydrate or prodrug thereof.

[0419] In some embodiments, the compound is

[chemical structure]

or a pharmaceutically-acceptable salt, solvate, hydrate or prodrug thereof; in some embodiments the enantiomeric excess (ee) of the S stereoisomer exceeds 70%.

[0420] In some embodiments, the compound is

[chemical structure]

or a pharmaceutically-acceptable salt, solvate, hydrate or prodrug thereof; in some embodiments the enantiomeric excess (ee) of the R stereoisomer exceeds 70%.

[0421] In some embodiments, the compound is

[chemical structure]

or a pharmaceutically-acceptable salt, solvate, hydrate or prodrug thereof.

[0422] In some embodiments, the compound is

[chemical structure]

or a pharmaceutically-acceptable salt, solvate, hydrate or prodrug thereof; in some embodiments the enantiomeric excess (ee) of the R stereoisomer exceeds 70%;
[0423] optionally wherein there is an enantiomeric excess (ee) of the S stereoisomer instead, optionally exceeding 70%.
   Some example embodiments of Formula (I)

[chemical structure]

### Specific Compound Synthesis

[0424] Starting reagents for following synthesis were sourced commercially using the LabNetwork (www.labnetwork.com), which is a website that permits one to search for chemical suppliers for inputted structures/chemical names. There are numerous suppliers listed on LabNetwork for the starting compound, Compound 1 (e.g. Apollo Scientific Ltd., Stockport, UK), and for Compound 3-A (e.g. Astatech Inc., Bristol PA, USA) and Compound 5-A (e.g. Atlantic Research Chemicals Ltd., Bude, UK).

[chemical structure]

[0425] Products of Scheme 1: Stereoisomer (“Stereoisomer 1”, enantiomeric excess >97%): Liquid Chromatography-Mass Spectrometry (LC-MS): Liquid chromatography (LC) retention time (RT)=2.516 minutes, Mass spectrometry (MS; electrospray ionization, positive mode): m/z 537.1 [M+H]⁺, 559.1 [M+Na]⁺, 269.1 [M+2H]²⁺. ¹H NMR (400 MHZ, DMSO-d6) δ (ppm) 11.43 (s, 1H), 8.30 (s, 1H), 8.21 (d, J=7.9 Hz, 1H), 7.93 (d, J=7.8 Hz, 2H), 7.68-7.56 (m, 3H), 7.56-7.46 (m, 4H), 7.20 (s, 1H), 7.09 (d, J=8.1 Hz, 2H), 6.97 (s, 1H), 5.96 (s, 1H), 4.33 (s, 1H), 4.19 (s, 1H). {NMR probe temperature=298.15 K}. Opposite stereoisomer (“Stereoisomer 2”, enantiomeric excess >97%): LC-MS: Liquid Chromatography RT=2.516 minutes, Mass spectrometry (MS; electrospray ionization, positive mode): m/z 537.1 [M+H]⁺, 559.1 [M+Na]⁺, 269.1 [M+2H]²⁺. ¹H NMR (400 MHZ, DMSO-d6) δ (ppm) 11.43 (s, 1H), 8.30 (s, 1H), 8.21 (d, J=7.9 Hz, 1H), 7.93 (d, J=7.8 Hz, 2H), 7.67-7.56 (m, 3H), 7.50 (t, J=6.5 Hz, 4H), 7.20 (s, 1H), 7.09 (d, J=8.2 Hz, 2H), 6.97 (s, 1H), 5.96 (s, 1H), 4.34 (s, 1H), 4.19 (s, 1H). {NMR probe temperature=298.15 K}.

[0426] The independent reaction schemes below, Scheme 2 and Scheme 3, are each the same as Scheme 1 up until Compound 5. This shared component isn't shown, just their point of divergence from Compound 5, which comes from using a different Compound 5-A, each of which is available from multiple suppliers on www.labnetwork.com (e.g. HE Chemical, Changzhou, Jiangsu, China).

[chemical structure]

[chemical structure]

[0427] The reaction schemes below, Scheme 4 and Scheme 5, show only starting material and product because they use the same internal steps as Scheme 1 (not shown), but with a different starting material, a different Compound 1 than Scheme 1 and each other, as shown below, and thence different products produced, as shown. Compound 1 of Scheme 4 and Scheme 5 are available from suppliers listed on www.labnetwork.com (e.g. Toronto Research Chemicals, Ontario, Canada).

[chemical structure]

[chemical structure]

[0428] The reaction scheme below, Scheme 6, is modified from Scheme 1, in order to produce a deuterated analogue, with deuterium in place of hydrogen on the chiral carbon. The starting compound in the scheme below, Compound 1, is available from multiple suppliers listed on LabNetwork (e.g. Apollo Scientific Ltd., Stockport, UK). The 2^{nd} compound, Compound 2, is also available from multiple suppliers listed on LabNetwork (e.g. Manchester Organics Ltd., UK). So, one of the art can choose between these two starting options. In an alternative embodiment (not shown), Compound 1A is replaced with Imidazole-¹³C,¹⁵N₂ (CAS no: 1173018-62-6; available from suppliers on www.Labnetwork.com e.g. Meihezhiku (Wuhan) Biotechnology Co., Ltd, China) in Scheme 6 to produce an alternative product of this disclosure, isotopically enriched for ¹³C and ¹⁵N at equivalent positions in the final product.

[chemical structure]

[0429] Products of Scheme 6: Stereoisomer (“Stereoisomer A”, enantiomeric excess >97%): LC-MS: LC retention time (RT)=2.685 minutes, MS (electrospray ionization, positive mode): m/z 538.1 [M+H]⁺, 560.1 [M+Na]⁺, 269.6 [M+2H]²⁺. High Resolution Mass Spectrometry (HRMS): Liquid Chromatography-Time of Flight (LC-TOF) MS (electrospray ionization, positive mode): LC Retention Time (RT)=0.166 minutes, m/z 538.0745928061 [M+H]⁺, m/z 560.0600137508 [M+Na]⁺, m/z 576.0250917093 [M+K]⁺, molar percent deuterium incorporation at chiral carbon=99.13%. ¹H NMR (400 MHZ, DMSO-d6) δ 11.48 (s, 1H), 8.33 (s, 1H), 8.25 (dt, J=7.8, 1.5 Hz, 1H), 7.96 (dt, J=7.7, 1.5 Hz, 1H), 7.92 (s, 1H), 7.71-7.60 (m, 3H), 7.60-7.49 (m, 4H), 7.23 (s, 1H), 7.14 (s, 2H), 7.00 (s, 1H), 4.38 (d, J=14.1 Hz, 1H), 4.23 (s, 1H). {NMR probe temperature=301 K}. Opposite stereoisomer (“Stereoisomer B”, enantiomeric excess >97%): LC-MS: LC retention time (RT)=2.685 minutes, MS (electrospray ionization, positive mode): m/z 538.1 [M+H]⁺, 560.1 [M+Na]⁺, 269.6 [M+2H]²⁺. HRMS: LC-TOF MS (electrospray ionization, positive mode): LC RT=0.163 minutes, m/z 538.0727757864 [M+H]⁺, m/z 560.0513502753 [M+Na]⁺, m/z 576.0327248583 [M+K]⁺, molar percent deuterium incorporation at chiral carbon=99.14%. ¹H NMR (400 MHZ, DMSO-d6) δ11.46 (s, 1H), 8.32 (s, 1H), 8.24 (d, J=7.9 Hz, 1H), 7.95 (d, J=7.7 Hz, 2H), 7.70-7.59 (m, 3H), 7.59-7.49 (m, 4H), 7.21 (s, 1H), 7.12 (d, J=7.9 Hz, 2H), 6.99 (s, 1H), 4.36 (d, J=13.9 Hz, 1H), 4.22 (s, 1H). {NMR probe temperature=300.7 K}.

[0430] The reaction scheme below, Scheme 8, is the same as Scheme 6 up until Compound 7. This shared component isn't shown, just the point of divergence from Compound 7, which comes from using a different Compound 7A, which is available from multiple suppliers on www.labnetwork.com (e.g. HE Chemical, Changzhou, Jiangsu, China).

[chemical structure]

[0431] The reaction scheme below, Scheme 9, is the same as Scheme 6 up until Compound 7. This shared component isn't shown, just the point of divergence from Compound 7, which comes from using a different Compound 7A, wherein three different options of Compound 7A are shown and the three resultant products, wherein Compound 7A(i), 7A(ii) and 7A(iii) are all available from multiple suppliers on www.labnetwork.com (e.g. all available from Fluorochem, Hadfield, Derbyshire, UK).

[chemical structure]

[0432] The reaction scheme below, Scheme 10, shows only starting material and product because it uses the same internal steps as Scheme 6, but with a different starting compound, as shown below (available from suppliers listed on www.labnetwork.com e.g. Matrix Scientific, Columbia, SC, USA), and thence a different product is produced, as shown. The other reaction scheme immediately below, Scheme 11, shows only starting material and product because it uses the same internal steps as Scheme 6 (starting from its Compound 2), but with a different starting compound, as shown below (available from suppliers listed on www.labnetwork.com e.g. Vitas-M Laboratory, Champaign, IL, USA), and thence a different product is produced, as shown. Product shown is the (predicted, MarvinSketch software [Chemaxon, Hungary]) predominant tautomer.

[chemical structure]

[chemical structure]

[0433] Using NaBT₄, where T is tritium (3H), instead of NaBD₄ in Scheme 6 produces final product (Compound 8) with tritium instead of deuterium on the chiral carbon, wherein this synthetic route and its tritiated product (and intermediates) are componentry to the present disclosure. The tritiated form of Compound 5 in this tritium variant of Scheme 6 can be substituted into the synthesis schemes described in [P1] to produce tritiated molecules, with tritium on their chiral carbon, which are componentry to the present disclosure, and in a non-limiting embodiment, one of more of these new compositions of matter are used as anti-cancer medicines.

[0434] Using NaBT₄ and NaBD₄ in Scheme 6 produces final compound (Compound 8) enriched for tritium (T) and deuterium (D) at the chiral carbon. Wherein the relative amount of enrichment can be set by setting the relative amount of NaBT₄ and NaBD₄ used. Wherein it is harder to enrich for tritium than deuterium. So, for example, if equal enrichment is sought then more NaBT₄ than NaBD₄ is required. One of the art, by routine experimentation, can modulate the relative amounts of NaBT₄ and NaBD₄ to confer their desired relative amount of enrichment. Wherein this synthetic route, its product and intermediates are componentry to the present disclosure. The tritium and deuterium enriched form of Compound 5 from this NaBT₄ and NaBD₄ variant of Scheme 6 can be substituted into the synthesis schemes described in [P1] to produce tritium and deuterium enriched compounds, which are componentry to the present disclosure, and in a non-limiting embodiment, one of more of these new compositions of matter are used as anti-cancer medicines. In an embodiment, deuterium is enriched more. In another embodiment, tritium is enriched more. In an alternative embodiment, deuterium and tritium are enriched equally (in sense that they have equal relative abundance as compared to protium, ¹H, wherein in this situation tritium could actually be said to be enriched more because it has a lower natural {so starting} abundance).

[0435] The reaction scheme below, Scheme 12, differs from Scheme 1 in order to produce methylated analogues, with methyl in place of hydrogen on the chiral carbon. The starting compound and imidazole are both available from Apollo Scientific Ltd., Stockport, UK and other suppliers listed on www.labnetwork.com. In an alternative embodiment (not shown), Compound 1A is replaced with Imidazole-¹³C,¹⁵N₂ (CAS no: 1173018-62-6; available from suppliers on Labnetwork e.g. Meihezhiku (Wuhan) Biotechnology Co., Ltd, China) in Scheme 12 to produce an alternative product of this disclosure, isotopically enriched for ¹³C and ¹⁵N at equivalent positions in the final product.

[chemical structure]

[0436] Products of Scheme 12: Stereoisomer (“Stereoisomer α”, enantiomeric excess >97%): LC retention time (RT)=2.536 minutes, MS (electrospray ionization, positive mode): m/z 551.0 [M+H]⁺, 573.0 [M+Na]⁺, 276.0 [M+2H]²⁺. ¹H NMR (400 MHZ, DMSO-d6) δ (ppm) 11.37 (s, 1H), 7.89 (dt, J=7.6, 1.5 Hz, 1H), 7.80 (d, J=7.8 Hz, 1H), 7.65-7.56 (m, 3H), 7.55-7.47 (m, 2H), 7.47-7.37 (m, 3H), 7.22 (d, J=8.4 Hz, 2H), 7.05 (s, 1H), 6.95 (s, 1H), 6.91 (s, 1H), 4.88 (d, J=13.6 Hz, 1H), 4.76 (d, J=13.7 Hz, 1H), 1.70 (s, 3H). {NMR probe temperature=298.2 K}. Opposite Stereoisomer (“Stereoisomer B”, enantiomeric excess >97%): LC retention time (RT)=2.540 minutes, MS (electrospray ionization, positive mode): m/z 551.1 [M+H]⁺, 573.0 [M+Na]⁺, 276.1 [M+2H]²⁺;

[0437] In some embodiments, Scheme 12 is implemented with each intermediate purified by HPLC, especially the last 3 intermediates, wherein this yields a lower fraction of impurit[y/ies] in the final product. Two alternatives for a step in Scheme 12:

[chemical structure]

[chemical structure]

[chemical structure]

[chemical structure]

[0438] For Scheme 13 and Scheme 14 above, starting materials are available from suppliers listed on www.labnetwork.com. For example: Compound 1 (e.g. Apollo Scientific Ltd., Stockport, UK), Compound 1b (e.g. ChemScene, Monmouth Junction, NJ, USA), Compound 5b (e.g. Astatech Inc., Bristol PA, USA) and Compound 7b (e.g. Atlantic Research Chemicals Ltd., Bude, UK). For Scheme 15 below, starting materials are available from suppliers listed on www.labnetwork.com: e.g. Compound 1b from ChemScene, Monmouth Junction, NJ, USA; e.g. Compound 5b from HE Chemical, Changzhou, Jiangsu, China.

[chemical structure]

[chemical structure]

[0439] For Scheme 16 below, starting materials are commerically available from suppliers listed on www.labnetwork.com: e.g. Compound 1 (Toronto Research Chemicals, Ontario, Canada), Compound 4 and Compound 7 (Astatech Inc., Bristol PA, USA).

[chemical structure]

[chemical structure]

[0440] For Scheme 17 below starting materials are commerically available from suppliers listed on www.labnetwork.com: e.g. Compounds 1, 3, 9, 11 (Toronto Research Chemicals, Ontario, Canada).

[chemical structure]

[chemical structure]

[0441] For Scheme 18 below, starting compounds can be sourced from suppliers listed on www.labnetwork.com, e.g. Compounds 1 and 8 can be sourced from Apollo Scientific Ltd., Stockport, UK, Compounds 3, 11 and 14 can be sourced from Astatech Inc., Bristol PA, USA.

[chemical structure]

[chemical structure]

[0442] For Scheme 19 below, starting compounds can be sourced from suppliers listed on www.labnetwork.com, e.g. Compounds 1, 5, 7, 14 can be sourced from Astatech Inc., Bristol PA, USA and Compound 3 from Apollo Scientific Ltd., Stockport, UK.

[chemical structure]

[chemical structure]

[chemical structure]

[0443] For Scheme 20 below, wherein its starting Compound 16 is from Scheme 19 above, other inputted compounds can be sourced from suppliers listed on www.labnetwork.com, e.g. Compounds 17 and 18 can be sourced from Astatech Inc., Bristol PA, USA.

[chemical structure]

[0444] Compound 16 in Scheme 20 above is of the form of Compound 1, the starting compound, in the molecule synthesis embodiments of [P1] (presented in its “Process of Preparation” section), BUT with the exception that has CF₃ on its chiral carbon. This trifluoromethylated form can be substituted into the synthesis schemes described in [P1] to produce trifluoromethylated molecules, with CF₃ on their chiral carbon, that are componentry to the present disclosure, and in a non-limiting embodiment, one of more of these new compositions of matter are used as anti-cancer medicines. Solvents, temperatures, pressures, and other reaction conditions may readily be selected by one of ordinary skill in the art. Starting materials are commercially available or can be readily prepared by one of ordinary skill in the art using known methods.

### Example (II)

### Summary of Formula (II)

[0445] This disclosure embodiment relates to compounds having the formula: Formula (II)

[chemical structure]

[chemical structure]

[0446] or pharmaceutically-acceptable salts, solvates, hydrates or prodrugs thereof, wherein:
[0447] G₁ is, independently at each point of use, aryl or heteroaryl;
[0448] G₂ is, independently at each point of use, N or CH;
[0449] L is independently at each point of use alkyl, or substituted alkyl, or deuterated alkyl, or aminoalkyl, or thioalkyl, or alkoxy, or halogen, or haloalkyl, or haloalkoxy, or hydroxyalkyl, or any atom or isotope permitted by valence (including any accompanying hydrogens by valence e.g. (non-limiting) OH, NH₂, SH, SiH₃, PH₂ etc.), for example hydrogen, or deuterium, or fluorine;
[0450] A is nitrogen (N), or N⁺, or carbon;
[0451] E is absent, or alkyl, or substituted alkyl, or deuterated alkyl, or aminoalkyl, or thioalkyl, or alkoxy or any atom or isotope permitted by valence (including any accompanying hydrogens by valence e.g. (non-limiting) OH, NH₂, SH, SiH₃, PH₂ etc.), for example hydrogen, or deuterium or fluorine;
[0452] C^{f}, C^{g}, C^{h} and C^{w} are each independently selected from a single bond, O, S, Se, NR^{V}, PR^{V}, BR^{V}, C(R^{V})₂ or Si(R^{V})₂, wherein each RY is independently selected from a constituent group of L (defined earlier);
[0453] x, w, f, g, h are independently selected to be 0, 1, 2 or 3;
[0454] d is a selected integer between 0 and 7;
[0455] k, s and s^{k} are independently selected to be 0, 1, 2, or 3;

[0456] The 5-sided ring structure is attached by any one of its available ring atoms, and none, one or two of its bonds can be a double bond, for example at locations shown by the “single or double bond” symbol; R₁ and R₅ are attached to any available carbon atom of phenyl rings A^{a} and B^{b}, respectively, and at each occurrence are independently selected from PH₂, OH, SH, hydrogen, deuterium, alkyl, substituted alkyl, trifluoromethoxy, halogen, haloalkyl, cyano, nitro, OR⁸, NR⁸R⁹, C(═O)R₈, CO₂R₈, C(═O)NR₈R₉, NR₈C(═O)R₉, NR₈C(═O)OR₉,
[0457] S(O)ₒR₉, S(O)R₉, SO₂R₉, S(O)₂R₉, SR₉, NR₈SO₂R₉, SO₂NR₈R₉, cycloalkyl, heterocyclo, aryl, and heteroaryl, and/or two of R1 and/or two of R5 join together to form a fused benzo ring;
[0458] R₂, R₃ and R₄ are independently selected from E (defined earlier), hydrogen, or deuterium, or alkyl, or deuterated alkyl, and substituted alkyl, or one of R₂, R₃ and R₄ is a bond to R, T or Y and the other of R₂, R₃ and R₄ are independently selected from hydrogen, alkyl, and substituted alkyl;
[0459] Z and Y are independently selected from C(═O), —CO₂—, —SO₂—, —CH₂—, —CH₂C(═O)—, and —C(═O) C(═O)—, or Z may be absent;
[0460] R and T are selected from —CH₂—, —C(═O)—, and —CH[(CH₂)ₚ(Q)]-, wherein Q is NR₁₀R₁₁, OR₁₀ or CN;
[0461] R₆ is selected from thienyl, alkyl, alkenyl, substituted alkyl, substituted alkenyl, aryl, substituted aryl, cycloalkyl, heterocyclo, C₂₋₄alkenyl, heteroaryl and aryl optionally substituted with a lower aliphatic group or one or more functional groups selected independently from the group consisting of —NH₂, —OH, phenyl, halogen, (C₁-C₄)alkoxy or —NHCOCH₃;
[0462] R₇ is selected from L (defined earlier), PH₂, OH, SH, hydrogen, alkyl, substituted alkyl, alkenyl, substituted alkenyl, aminoalkyl, halogen, haloalkyl, cyano, nitro, keto (═O), hydroxy, alkoxy, alkylthio, C(═O)H, acyl, CO₂H, alkoxycarbonyl, carbamyl, sulfonyl, sulfonamidyl, cycloalkyl, heterocyclo, aryl, and heteroaryl;
[0463] R₈ and R₉ are independently selected from hydrogen, alkyl, substituted alkyl, C₂₋₄ alkenyl optionally substituted, cycloalkyl, heterocyclo, aryl, and heteroaryl, or R₈ and R₉ taken together to form a heterocyclo or heteroaryl;
[0464] R₁₀ and R₁₁ are independently selected from hydrogen, alkyl, and substituted alkyl;
[0465] m and n are independently selected from 0, 1, 2 and 3
[0466] o, p and q are independently 0, 1 or 2; and
[0467] r and t are 0 or 1.

### Preferred Compounds of Formula (II)

[0468] Preferred methods are to use, and preferred compounds are, compounds with the following formula, or pharmaceutically-acceptable salts, solvates, hydrates or prodrugs thereof,

[chemical structure]

[0469] wherein:
[0470] L is hydrogen, or deuterium, or methyl, or hydroxyalkyl, or fluorine;
[0471] A is nitrogen (N), or N⁺, or carbon;
[0472] E is absent, or alkyl, or substituted alkyl, or deuterated alkyl, or aminoalkyl, or thioalkyl, or alkoxy or any atom or isotope permitted by valence (including any accompanying hydrogens by valence e.g. (non-limiting) OH, NH₂, SH, SiH₃, PH₂ etc.), for example hydrogen or deuterium;
[0473] R₁ and R₅ are attached to any available carbon atom of phenyl ring A^{a} and phenyl ring B^{b}, respectively, and at each occurrence are independently selected from hydrogen, deuterium, alkyl, aralkyl, aminoalkyl, halogen, cyano, nitro, hydroxy, alkoxy, trifluoromethoxy, alkylthio, NH₂, NH(alkyl), N(alkyl)₂, C(═O)H, acyl, CO₂H, alkoxycarbonyl, carbamyl, sulfonyl, sulfonamide, cycloalkyl, heterocyclo, aryl, and heteroaryl, and/or two of R₁ and/or two of R₅ join together to form a fused benzo ring;
[0474] R₂, R₃ and R₄ are independently selected from hydrogen and alkyl;
[0475] Z is —CO₂—, —SO₂—, or is absent;
[0476] Y, R and T are selected from —CH₂— and —C(═O)—,
[0477] R₆ is selected from:
[0478] C₁₋₄alkyl or C₁₋₄alkenyl optionally substituted with up to three (selected independently) of halogen, aryl and CO₂C₁₋₆alkyl;
[0479] phenyl optionally substituted with up to three (selected independently) R₁₂ and/or having fused thereto a benzo-ring or a five to six membered heteroaryl;
[0480] heteroaryl selected from thiophenyl, imidazolyl, pyrazolyl, and isoxazolyl wherein said heteroaryl is optionally substituted with up to two (selected independently) R₁₂,
[0481] R₇ is selected from hydrogen, alkyl, substituted alkyl, alkenyl, substituted alkenyl, aminoalkyl, halogen, cyano, nitro, keto (═O), hydroxy, alkoxy, alkylthio, C(═O)H, acyl, CO₂H, alkoxycarbonyl, carbamyl, sulfonyl, sulfonamide, cycloalkyl, heterocyclo, aryl, and heteroaryl;
[0482] R₁₂ at each occurrence is independently selected from each other R₁₂ from the group consisting of C₁₋₆alkyl, halogen, nitro, cyano, hydroxy, alkoxy, NHC(═O)alkyl, —CO₂alkyl, —SO2phenyl, aryl, five to six membered monocyclic heteroaryl, and phenyloxy or benzyloxy in turn optionally substituted (selected independently) with halogen, hydroxyl, C₁₋₄alkyl, O(C₁₋₄alkyl);
[0483] m and n are independently selected from 0, 1, 2 or 3; and
[0484] q is 0, 1 or 2; and
[0485] r and t are 0 or 1.

[0486] More preferred are compounds having the following formula, or pharmaceutically-acceptable salts, solvates, hydrates or prodrugs thereof,

[chemical structure]

[0487] wherein
[0488] R₁ and R₅ are attached to any available carbon atom of phenyl ring A^{a} and phenyl ring B^{b}, respectively, and at each occurrence are independently selected from alkyl,
[0489] halogen, cyano, hydroxy, alkoxy, NH₂, NH (alkyl), N (alkyl)₂, C(═O)H, acyl, CO₂H, alkoxycarbonyl, and/or two of R₁ and/or two of R₅ join together to form a fused benzo ring;
[0490] R₂, R₃ and R₄ are independently selected from hydrogen and lower alkyl;
[0491] Z is —CO₂—, —SO₂—, or is absent;
[0492] R₆ is selected from:
[0493] C₁₋₄alkyl or C₁₋₄alkenyl optionally substituted with up to three (selected independently) of halogen, aryl and CO₂C₁₋₆alkyl;
[0494] phenyl optionally substituted with up to three (selected independently) R₁₂ and/or having fused thereto a benzo ring or a five to six membered heteroaryl;
[0495] heteroaryl selected from thiophenyl, imidazolyl, pyrazolyl, and isoxazolyl, wherein said heteroaryl is optionally substituted with up to two (selected independently) R₁₂,
[0496] R₁₂ at each occurrence is independently selected from each other R₁₂ from the group consisting of C₁₋₆ alkyl, halogen, nitro, cyano, hydroxy, alkoxy, NHC(═O)alkyl,
[0497] —CO₂alkyl, —SO₂phenyl, aryl, five to six membered monocyclic heteroaryl, and phenyloxy or benzyloxy in turn optionally substituted with (selected independently) halogen, hydroxyl, C₁₋₄ alkyl, and/or O(C₁₋₄ alkyl); and
[0498] m and n are independently selected from 0, 1, or 2.

[0499] Even more preferred are compounds as immediately defined above wherein R⁶ is selected from C₁₋₄alkyl, trifluoromethyl, benzyl, C₂₋₃alkenyl substituted with phenyl,

[chemical structure]

[0500] wherein:
[0501] R₁₅ is halogen, alkyl, nitro, cyano, hydroxy, alkoxy, NHC(═O)alkyl, and/or two R₁₅ groups are taken together to form a fused benzo ring or a five to six membered heteroaryl;
[0502] R₁₆ is selected from hydrogen, deuterium, halogen, alkyl, nitro, cyano, hydroxy, alkoxy, NHC(═O)alkyl, and phenyloxy or benzyloxy in turn optionally substituted with 1 to 3 groups independently selected from hydrogen, deuterium, halogen, cyano, C₁₋₄alkoxy;
[0503] R₁₇ is selected from alkyl, alkoxy, CO₂C₁₋₆alkyl, and SO₂phenyl;
[0504] and u and v are independently 0, 1 or 2.

[0505] Most preferred compounds of Formula (II) are those having the formula:

[chemical structure]

[0506] wherein
[0507] L is deuterium;
[0508] R₂ is hydrogen or CH₃;
[0509] Z is —CO₂—, —SO₂—, or is absent; and
[0510] R₆ is selected from the groups recited immediately above, most preferably

[chemical structure]

### Some Example Embodiments of Formula (II)

[chemical structure]

[chemical structure]

[0511] Scheme IIa is a route for synthesizing Compound 31 [10], starting reagents are commercially available from multiple suppliers listing on the LabNetwork (www.labnetwork.com) e.g. Compounds 1, 7 and 9 are available from Astatech Inc., Bristol PA, USA, Compound 2 from Stru Chem, Wujiang city, China.

[chemical structure]

[0512] Product of Scheme IIa, Compound 31: LC retention time (RT)=0.87 minutes, MS (electrospray ionisation, positive mode): m/z 554.90 [M+H]⁺, 576.90 [M+Na]⁺, 278.90 [M+2H]²⁺, (all Observed m/z are within 0.3 Daltons of Expected: 555.14 [M+H]⁺, 577.12 [M+Na]⁺, 278.07 [M+2H]²⁺); ¹H NMR (400 MHZ, Methanol-d4) δ (ppm) 8.35 (s, 1H), 8.14-8.06 (m, 1H), 8.04 (d, J=2.1 Hz, 1H), 7.84-7.71 (m, 2H), 7.27 (dt, J=22.4, 7.4 Hz, 4H), 7.16 (dd, J=8.0, 5.6 Hz, 2H), 7.09 (d, J=7.5 Hz, 2H), 7.03 (t, J=7.4 Hz, 1H), 4.71 (d, J=13.9 Hz, 1H), 4.37 (d, J=14.2 Hz, 1H), 4.29 (d, J=14.2 Hz, 1H), 3.96 (dd, J=19.7, 13.4 Hz, 2H), 3.17-3.10 (m, 1H), 2.78 (d, J=12.8 Hz, 1H), 2.69 (ddd, J=14.5, 9.7, 5.3 Hz, 1H), 2.54 (dt, J=13.7, 8.6 Hz, 1H), 2.11 (s, 3H), 1.50 (s, 1H), 1.36 (dtd, J=14.1, 9.1, 5.1 Hz, 1H) {NMR probe temperature=297.9 K}.

[0513] ¹H NMR (400 MHZ, Chloroform-d) δ (ppm) 8.21 (s, 1H), 7.93 (d, J=2.1 Hz, 1H), 7.82 (s, 1H), 7.65 (dd, J=8.4, 2.1 Hz, 1H), 7.58 (d, J=8.4 Hz, 1H), 7.30 (s, OH), 7.26 (s, 2H), 7.20 (t, J=7.3 Hz, 1H), 7.10 (d, J=7.4 Hz, 2H), 7.07-6.98 (m, 2H), 4.60 (d, J=13.8 Hz, 1H), 4.32 (d, J=14.1 Hz, 1H), 4.12 (dd, J=24.1, 14.0 Hz, 2H), 3.82 (d, J=12.8 Hz, 1H), 3.08 (s, 2H), 2.91 (d, J=13.0 Hz, 1H), 2.76-2.64 (m, 1H), 2.49 (dt, J=14.8, 8.2 Hz, 1H), 2.11 (s, 3H), 1.58-1.43 (m, 1H) {NMR probe temperature=298.5 K}.

[0514] ¹³C NMR (101 MHZ, Methanol-d4) δ (ppm) 149.14, 142.91, 140.73, 138.20, 134.62, 134.51, 132.72, 132.22, 130.62, 130.05, 129.75, 129.50, 129.39, 129.20, 128.48, 127.87, 127.01, 123.78, 121.75, 58.88, 53.98, 53.69, 48.11, 33.55, 31.58, 9.53 {NMR probe temperature=298.0 K}.

[chemical structure]

[0515] The reaction schemes below, Scheme IIc, Scheme IId, Scheme IIe and Scheme IIf, show only starting material(s) and product because they use the same internal steps as Scheme IIa (not shown), but with a different starting material, a different Compound 1 in the case of Scheme IIc, Scheme IId, Scheme IIe, or a different Compound 2 in the case of Scheme IIf, and thence different products are produced as shown. Starting compounds are available from suppliers listed on www.labnetwork.com: e.g. Compound 1 of Scheme IIc and Scheme IIe from Fluorochem, Hadfield, Derbyshire, UK, e.g. Compound 1 of Scheme IId from J&W Pharmlab LLC, Levittown, PA, USA, e.g. Compound 2 of Scheme IIf from Arena Chemical, La Mure, France, Compound 1 of Scheme IIf from Astatech Inc., Bristol PA, USA.

[chemical structure]

[chemical structure]

[chemical structure]

[chemical structure]

[0516] The reaction schemes below, Scheme IIg and Scheme IIh are the same as Scheme IIa up until Compound 6. This shared component isn't shown, just the point of divergence from Compound 6, which comes from using a different Compound 7, wherein the Compound 7 options shown in Scheme IIg and Scheme IIh are available from multiple suppliers on www.labnetwork.com (e.g. available from Fluorochem, Hadfield, Derbyshire, UK).

[chemical structure]

[chemical structure]

[0517] The reaction schemes below, Scheme IIi, Scheme IIj, Scheme IIk and Scheme IIl are the same as Scheme IIa up until Compound 8. This shared component isn't shown, just the point of divergence from Compound 8, which comes from using a different Compound 9, wherein the Compound 9 options shown in Scheme IIi, Scheme IIj, Scheme IIk and Scheme IIl are all available from multiple suppliers on www.labnetwork.com (e.g. all, except that for Scheme IIl, available from Fluorochem, Hadfield, Derbyshire, UK, Compound 9 from Scheme IIl available from Matrix Scientific, Columbia, SC, USA).

[chemical structure]

[chemical structure]

[chemical structure]

[chemical structure]

### Example (III)

### Summary of Formula (III)

[0518] This disclosure embodiment relates to compounds having the following formula: Formula (III)

[chemical structure]

[chemical structure]

[0519] or their enantiomers, diastereomers, pharmaceutically-acceptable salts, solvates, hydrates or prodrugs thereof, wherein:

[0520] Optionally, one or more places have deuterium in place of hydrogen, at an artificially high level of deuterium incorporation, in excess of the naturally occurring abundance;

[0521] Optionally, one or more places have fluorine, or other halogen, or methyl, or alkyl, or substituted alkyl, in place of hydrogen;
[0522] Z is heteroaryl;
[0523] g, w and k are independently selected from 0, 1, 2, 3, 4;
[0524] L is independently at each point of its use hydrogen, alkyl, or substituted alkyl (non-limiting example: CF₃), or deuterated alkyl (non-limiting example: CD₃), or aminoalkyl, or thioalkyl, or alkoxy, or halogen, or haloalkyl, or haloalkoxy, or hydroxyalkyl, or any atom or isotope permitted by valence (including any accompanying hydrogens by valence e.g. (non-limiting) OH, NH₂, SH, SiH₃, PH₂ etc.); X^{g}, X^{w} and X^{k} are independently selected from a single bond, O, S, Se, NR^{V}, PR^{V}, BR^{V}, C(R^{V})₂ or Si(R^{V})₂, wherein each RY is independently selected from a constituent group of L (defined earlier);
[0525] G₁ is, independently at each point of use, N or CH;
[0526] c is selected from 1, 2, 3, 4, 5, 6, 7, 8, 9;
[0527] m is independently at each point of use selected from 0, 1, 2, 3, 4, 5, 6, as valence permits;
[0528] R2 is hydrogen, L (defined earlier), hydroxyl (—OH), SH, NH₂, methyl, alkoxy, substituted alkoxy, haloalkoxy, ether, halogen or —OC (O)R14;
[0529] R14 is hydrogen, alkyl, haloalkyl, aryl, arylalkyl, cycloalkyl or (cycloalkyl)alkyl;
[0530] R3 and R4 are each independently hydrogen, or L (defined earlier), or CF₃, or NH₂, or OH, or chlorine or other halogen, or alkyl, or substituted alkyl, or deuterated alkyl, or arylalkyl, or R3 and R4 taken together with the carbon atom to which they are attached form a 3- to 7-membered carbocyclic ring;
[0531] R5 is independently at each point of use hydrogen, L (defined earlier), PH2, OH, SH, alkyl, substituted alkyl, halogen, nitrile, haloalkyl, aryl, heteroaryl, cycloalkyl or heterocyclo;
[0532] R12 is selected from hydrogen, deuterium, alkyl, aryl, heteroaryl, cycloalkyl, heterocyclo;
[0533] X is alkyl;
[0534] Y is a single bond, —CH₂—, —C(O)—, —O—, —S—, —N(R14)- or (X^{f})_{f} where X^{f} is selected from a single bond, O, S, NR^{V} or C(R^{V})₂, wherein each R^{V} is independently selected from a constituent group of L (defined earlier);
[0535] f is 0, 1, 2 or 3;
[0536] A is nitrogen (N), or N⁺, or carbon;
[0537] E is absent, or alkyl, or substituted alkyl (non-limiting example: CF₃), or deuterated alkyl, or aminoalkyl, or thioalkyl, or alkoxy or any atom or isotope permitted by valence (including any accompanying hydrogens by valence e.g. (non-limiting) OH, NH₂, SH, SiH₃, PH₂ etc.), for example hydrogen, or deuterium, or fluorine;

[0538] R8 is independently selected at each point of use from E (defined earlier), hydrogen, alkyl, halogen, carbamyl, carbamylC₁₋₄alkyl, substituted alkyl or two R8 groups join to form an optionally substituted fused phenyl ring;
[0539] q is 0, 1, 2, 3 or 4.
[0540] R1 is selected from L (defined earlier), hydrogen, deuterium, CN, SO₂-piperidine, SO₂-piperidine substituted with 0-10 (selected independently) of R5, R9, cyano, halogen, alkyl, substituted alkyl, alkenyl, substituted alkenyl, alkylene, substituted alkylene, alkynyl, substituted alkynyl, alkoxy, thioalkyl, aminoalkyl, carbamyl, sulfonyl, sulfonamide, cycloalkyl, (cycloalkyl)alkyl, hydroxyalkyl, haloalkyl, haloalkoxy, alkoxyalkyl, morpholinylalkyl, aryl, arylalkyl, heterocyclo, heteroaryl, (heterocyclo)alkyl, (heteroaryl)alkyl, acyl, alkoxycarbonyl, substituted amino;

[0541] Most preferably R1 is smaller than 300 Daltons;
[0542] R9 is

[chemical structure]

[0543] R6 and R⁷ are independently hydrogen, L (defined earlier), R1 (provided R1 is not R9), alkyl, aryl, heteroaryl, cycloalkyl, heterocyclo, arylalkyl, (heteroaryl)alkyl, haloalkyl, hydroxyalkyl, hydroxyalkyl substituted with a carboxylic ester and/or carboxylic acid, alkoxyalkyl, thioalkyl, (cycloalkyl)alkyl, morpholinylalkyl, heterocyclo or (heterocyclo)alkyl; or R6 and R7 taken together with the nitrogen atom to which they are attached form a 5- to 7-membered mono or bicyclic ring including fused rings such as 1-pyrrolidinyl, 1-piperidinyl, 1-azepinyl, 4-morpholinyl, 4-thiamorpholinyl, 4-thiamorpholine dioxide, 1-piperazinyl, 4-alkyl-1-piperazinyl, 4-arylalkyl-1-piperazinyl, 4-diarylalkyl-1-piperazinyl; or 1-piperazinyl, l-pyrrolidinyl, 1-piperidinyl or 1-azepinyl substituted with one or more independently selected L (defined earlier), alkyl, alkoxy, alkylthio, halo, trifluoromethyl, hydroxy, aryl, arylalkyl, —COOR14 or —CO-substituted amino;
[0544] or R5 and R6 taken together with the atoms to which they are attached form a 5- to 7-membered ring optionally substituted with aryl;
[0545] Encompassed by this disclosure are methods of administering a therapeutically effective amount of any compound(s) of [P6], or a pharmaceutically-acceptable salt, solvate, hydrate or prodrug thereof, optionally in a pharmaceutical composition(s), optionally in co-therapy with another anti-cancer treatment(s), to treat/ameliorate/prevent/combat cancer in a subject. Especially preferred for this use are compounds of [P6] with 3S, 4R stereochemistry.

### Preferred Compounds of Formula (III)

[0546] Preferred methods are to use, and preferred compounds are, compounds of Formula (III), their enantiomers, diastereomers, pharmaceutically-acceptable salts, solvates, hydrates or prodrugs thereof, in which:
[0547] Z is triazolyl optionally substituted with one to two (selected independently) R8 or imidazolyl optionally substituted with one to two (selected independently) R8 and/or having fused thereto a benzene ring in turn optionally substituted with one to two R8 (selected independently);
[0548] Y is oxygen;
[0549] R2 is hydroxyl;
[0550] R3 and R4 are methyl or chlorine;
[0551] R1 is R9;
[0552] G₁ is nitrogen;
[0553] R6 and R⁷ are alkyl; or R6 and R⁷ taken together with the nitrogen atom to which they are attached (G₁=N) form a 6-membered ring;

[0554] X is alkyl;
[0555] R12 is aryl or heterocyclo;
[0556] A is N;
[0557] E is absent, or deuterium, or hydrogen;
[0558] R5 and R⁸ are hydrogen;
[0559] Stereochemistry is 3S, 4R;

### Some Example Embodiments of Formula (III)

[chemical structure]

### Example (IV)

[0560] Background: Well known to those of the art: amino acids have the following structure, wherein the R group is different in different amino acids.

[chemical structure]

### Summary of Formula (IV)

[0561] This disclosure embodiment relates to compounds having the following formula: Formula (IV)

[chemical structure]

[0562] or their enantiomers, diastereomers, pharmaceutically-acceptable salts, solvates, hydrates or prodrugs thereof, wherein:
[0563] G1 is, independently at each point of use, N or CH;
[0564] u is selected from 0, 1, 2, 3, 4, 5, 6, 7, 8;
[0565] X is selected from O or S;
[0566] A is selected from hydrogen, deuterium, alkyl, substituted alkyl, cycloalkyl, heterocyclo, aryl, heteroaryl, aminoalkyl, thioalkyl, alkoxy and an R group of a proteogenic amino acid, or other amino acid synthesized or used by a living system (non-limiting example of such a system: a human), which is optionally isotopically enriched, and/or substituted by alkyl, substituted alkyl, deuterated alkyl, halogen, cycloalkyl, heterocyclo, aryl, heteroaryl, aminoalkyl, thioalkyl, alkoxy, haloalkyl, haloalkoxy, or any atom or isotope permitted by valence (including any accompanying hydrogens by valence e.g. (non-limiting) OH, NH₂, SH, SiH₃, PH₂ etc.);
[0567] n and m are 0, 1, or 2;
[0568] R₁ through R₅ are independently selected from hydrogen, halogen, NO₂, PH₂, OH, SH, CN, C₁₋₈alkyl, substituted C₁₋₈alkyl, C₃₋₈cycloalkyl, aryl, heterocyclo, heteroaryl, OR₉, SR₉, COR₁₁, CO₂R₁₁, CONR₉R₁₀ or NR₉R₁₀;
[0569] R₆ and R⁷ are independently hydrogen, alkyl or substituted alkyl;
[0570] R₈ is hydrogen, deuterium, C₁₋₈alkyl, substituted C₁₋₈alkyl, deuterated C₁₋₈alkyl, aryl, heterocyclo, heteroaryl, aminoalkyl, thioalkyl, alkoxy, halogen, haloalkyl, haloalkoxy, or any atom or isotope permitted by valence (including any accompanying hydrogens by valence e.g. (non-limiting) OH, NH₂, SH, SiH₃, PH₂ etc.);
[0571] Z is hydrogen, alkyl, substituted alkyl, cycloalkyl, aryl, heterocyclo, heteroaryl, COR₁₁, CO₂R₁₁, SO₂R₁₁, S(O)R₁₁ or CONR₉R₁₀;
[0572] R₉ and R₁₀ are independently hydrogen, C₁₋₈alkyl, substituted C₁₋₈alkyl, C₃₋₁₀cycloalkyl, aryl, heterocyclo, heteroaryl, COR₁₃, SO₂R₁₃ or S (O)R₁₃; and
[0573] R₁₁, R₁₂ and R13 are independently hydrogen, C₁₋₈alkyl, substituted C₁₋₈alkyl, C₃₋₁₀cycloalkyl, aryl, heterocyclo or heteroaryl;
[0574] wherein each occurrence of R₉-R₁₃ is chosen independently.

[0575] Preferred compounds of Formula (IV)

[0576] Preferred methods are to use, and preferred compounds are, compounds of Formula (IV), their enantiomers, diastereomers, pharmaceutically-acceptable salts, solvates, hydrates or prodrugs thereof, in which:
[0577] R₂, R₃ and R4 are all hydrogen; and/or
[0578] R₆ and R₇ are both hydrogen; and/or
[0579] n and m are both 1; and/or
[0580] R₁ and R₅ are both C₁₋₈ alkyl, preferably both R₁ and R₅ are isopropyl groups.

[0581] Other preferred methods use, and preferred compounds are, compounds of Formula (IV), their enantiomers, diastereomers, pharmaceutically-acceptable salts, solvates, hydrates or prodrugs thereof, in which:
[0582] Z is C₁₋₈alkyl, C₂₋₈alkenyl, C₁₋₈haloalkyl, cycloalkyl, aryl, arylalkyl, heteroaryl, heteroarylalkyl-COR₁₁, —CO₂R₁₁, —SO₂R₁₁, —S(O)R₁₁ or —CONR₉R₁₀; especially preferable is benzyl, —C(O)₂H or —C(O)₂C₁₋₈alkyl;
[0583] R₉ is hydrogen;
[0584] R₁₀ is C₁₋₈alkyl or C₃₋₁₀cycloalkyl; aryl or arylalkyl; and
[0585] R₁₁ is hydrogen, C₁₋₈alkyl, C₃₋₁₀cycloalkyl, C₃₋₁₀heterocycloalkyl, C₃₋₁₀aryl or C₃₋₁₀ arylalkyl.

[0586] Other preferred methods use, and preferred compounds are, compounds of Formula (IV), their enantiomers, diastereomers, pharmaceutically-acceptable salts, solvates, hydrates or prodrugs thereof, in which:
[0587] A is hydrogen, deuterium, C₁₋₈alkyl, aminoalkyl, heteroaryl, aryl, or alkyl substituted with one or more substituents independently selected from heterocyclo, aryl, OH, SH, ST¹, —C(O), H, T³-NT⁵T⁶, -T⁸-C(O)ₜT⁹-NT⁵T⁶ or T³-N(T²) T⁴NT⁵T⁶,
[0588] T¹ is alkyl, (hydroxy)alkyl, (alkoxy)alkyl, alkenyl, alkynyl, cycloalkyl, (cycloalkyl)alkyl, cycloalkenyl, (cycloalkenyl)alkyl, aryl, (aryl)alkyl, heterocyclo, (heterocyclo)alkyl, heteroaryl or (heteroaryl)alkyl;
[0589] T² and T³ are each independently a single bond, -T⁸-S(O)ₜ-T⁹-, -T⁸-C(O)-T⁹-, -T¹⁸-C(S)-T⁹, -T⁸-S-T⁹-, -T⁸-O—C(O)-T⁹-, -T⁸-C(O)ₜT⁹-, -T⁸-C(═NT¹⁰)-T⁹- or -T⁸-C(O)—C(O)-T⁹-;
[0590] T⁵, T⁶, T⁷, T⁸ and T⁹ are independently hydrogen, alkyl, (hydroxy)alkyl, (alkoxy)alkyl, alkenyl, alkynyl, cycloalkyl, (cycloalkyl)alkyl, cycloalkenyl, (cycloalkenyl)alkyl, aryl, (aryl)alkyl, heterocyclo, (heterocyclo)alkyl, heteroaryl or (heteroaryl)alky, each group optionally substituted where valence allows by one to three groups independently selected from halo, cyano, nitro, OH, oxo, —SH, alkyl, (hydroxy)alkyl, (alkoxy)alkyl, alkenyl, alkynyl, cycloalkyl, (cycloalkyl)alkyl, cycloalkenyl, (cycloalkenyl)alkyl, aryl, (aryl)alkyl, heterocyclo, (heterocyclo)alkyl, heteroaryl or (heteroaryl)alkyl, —OT¹¹, —ST¹¹, —C(O)ₜH, —C(O)ₜT¹¹, —O—C(O)T¹¹, TC(O)ₜN(T¹²)T¹¹, —SO₃H, —S(O)ₜT¹¹, S(O)ₜN(T¹²)T¹¹, -T¹³-NT¹¹T¹², -T¹³-N(T¹²)-T⁴-NT¹¹T²², -T¹³-N(T¹¹)-T¹²-T¹¹ and -T¹³-N(T¹⁸)-T¹⁴-H; or
[0591] T8 and T⁹ are each independently a single bond, alkylene, alkenylene or alkynylene;
[0592] T¹¹ is alkyl, (hydroxy)alkyl, (alkoxy)alkyl, alkenyl, alkynyl, cycloalkyl, (cycloalkyl)alkyl, cycloalkenyl, (cycloalkenyl)alkyl, aryl, (aryl)alkyl, heterocyclo, (heterocyclo)alkyl, heteroaryl or (heteroaryl)alkyl;
[0593] T¹² is halo, cyano, nitro, OH, oxo, —SH, alkyl, (hydroxy)alkyl, (alkoxy)alkyl, alkenyl, alkynyl, cycloalkyl, (cycloalkyl)alkyl, cycloalkenyl, (cycloalkenyl)alkyl, aryl, (aryl)alkyl, heterocyclo, (heterocyclo)alkyl, heteroaryl or (heteroaryl)alkyl, —C(O)ₜH or —SO₃H;
[0594] T¹³ and T¹⁴ are each independently a single bond, —S(O)—, —C(O)—, —C(S)—, —O—, —S—, —O—C(O)—, —C(O)—, —C(═NT¹³)— or —C(O)—C(O)—;
[0595] wherein each occurrence of T1-T14 is chosen independently; and
[0596] t is 1 or 2.

[0597] Preferred compounds of the foregoing section are those in which A is hydrogen, deuterium, C₁₋₈alkyl, aminoalkyl, hydroxyalkyl, heterocycloalkyl, heteroaryl alkyl, aryl, arylalkyl, or alkyl substituted with a group selected from SH, ST⁴, —C(O)ₜH, T⁶-NT⁸T⁹, -T¹¹-C(O)ₜT¹²-NT⁸T⁹ and T⁶-N(T⁵)T⁷NT⁸T⁹. More preferred are those compounds in which A is hydrogen, deuterium, methyl, —CH₂ (CH₃)₂, —(CH₂)₂(CH₃)₂, —CH(CH₃)CH₂(CH₃), —(CH₂)OH, hydroxyethyl, —(CH₂)₂SCH₃, —CH₂SH, phenyl, —CH₂(phenyl), —CH₂(p-hydroxyphenyl), —CH₂(indole), —(CH₂)C(O)NH₂, —(CH₂)₂C(O)NH₂, —(CH₂)₂C(O)OH, —CH₂C(O)OH, —(CH₂)₄NH₂, —(CH₂)₃(═NH)CNH₂, or —CH₂(imidazole). Especially preferred A groups are —CH(CH₃)CH₂(CH₃), phenyl, phenyl alkyl or —CH₂(2-indole).

[0598] Alternatively preferred methods use, and preferred compounds are, compounds of Formula (IVb), their enantiomers, diastereomers, pharmaceutically-acceptable salts, solvates, hydrates or prodrugs thereof, in which: Formula (IVb)

[chemical structure]

[0599] wherein:
[0600] A is selected from hydrogen, deuterium, C₁₋₈alkyl, aminoalkyl, substituted alkyl, deuterated alkyl, aryl, heteroaryl, or alkyl substituted with one or more substituents independently selected from heterocyclo, aryl, heteroaryl, OH, SH, ST¹, —C(O)ₜH, T³-NT⁵T⁶, -T⁸-C(O)ₜT⁹-NT⁵T⁶ or T³-N(T²) TANT⁵T⁶;
[0601] R¹ and R⁵ are independently C₁₋₈alkyl optionally substituted where valence allows;
[0602] R⁶ and R⁷ are independently hydrogen or C₁₋₈alkyl;
[0603] R₈ is hydrogen, halogen, deuterium, C₁₋₈alkyl or substituted C₁₋₈alkyl;
[0604] Z is hydrogen, C₁₋₈alkyl, C₂₋₈alkenyl, C₁₋₈haloalkyl, cycloalkyl, aryl, arylalkyl, heteroaryl, heteroarylalkyl —COR¹¹, —CO₂R¹¹, —SO₂R¹¹, —S(O)R¹¹ or —CONR⁹R¹⁰;
[0605] R⁹ is hydrogen,
[0606] R¹⁰ is C₁₋₈alkyl or C₃₋₁₀cycloalkyl; aryl or arylalkyl;
[0607] R¹¹ is hydrogen, C₁₋₈alkyl, C₃₋₁₀cycloalkyl, C₃₋₁₀heterocycloalkyl, C₃₋₁₀aryl or C₃₋₁₀arylalkyl.
[0608] T¹ is alkyl, (hydroxy)alkyl, (alkoxy)alkyl, alkenyl, alkynyl, cycloalkyl, (cycloalkyl)alkyl, cycloalkenyl, (cycloalkenyl)alkyl, aryl, (aryl)alkyl, heterocyclo, (heterocyclo)alkyl, heteroaryl or (heteroaryl)alkyl;
[0609] T² and T³ are each independently a single bond, -T⁸-S(O)ₜ-T⁹-, -T⁸-C(O)-T⁹-, -T¹⁸-C(S)-T⁹-, -T⁸-O-T⁹-, -T⁸-S-T⁹-, -T⁸-O—C(O)-T⁹-, -T⁸-C(O)ₜT⁹-, -T⁸-C(═NT¹⁰)-T⁹- or -T⁸-C(O)—C(O)-T⁹-;
[0610] T⁵, T⁶, T⁷, T⁸ and T⁹ are independently hydrogen, alkyl, (hydroxy)alkyl, (alkoxy)alkyl, alkenyl, alkynyl, cycloalkyl, (cycloalkyl)alkyl, cycloalkenyl, (cycloalkenyl)alkyl, aryl, (aryl)alkyl, heterocyclo, (heterocyclo)alkyl, heteroaryl or (heteroaryl)alky, each group optionally substituted where valence allows by one to three groups independently selected from halo, cyano, nitro, OH, oxo, —SH, alkyl, (hydroxy)alkyl, (alkoxy)alkyl, alkenyl, alkynyl, cycloalkyl, (cycloalkyl)alkyl, cycloalkenyl, (cycloalkenyl)alkyl, aryl, (aryl)alkyl, heterocyclo, (heterocyclo)alkyl, heteroaryl or (heteroaryl)alkyl, —OT¹¹, —ST¹¹, —C(O)ₜH, —C(O)ₜT¹¹, —O—C(O)T¹¹, TC(O)ₜN(T¹²)T¹¹, —SO₃H, —S(O)ₜT¹¹, S(O)ₜN(T¹²)T¹¹, -T¹³-NT¹¹T¹², -T¹³-N(T¹²)-T⁴-NT¹¹T²², -T¹³-N(T¹¹)-T¹²-T¹¹ and -T¹³-N(T¹⁸)-T¹⁴-H; or
[0611] T8 and T⁹ are each independently a single bond, alkylene, alkenylene or alkynylene;
[0612] T¹¹ is alkyl, (hydroxy)alkyl, (alkoxy)alkyl, alkenyl, alkynyl, cycloalkyl, (cycloalkyl)alkyl, cycloalkenyl, (cycloalkenyl)alkyl, aryl, (aryl)alkyl, heterocyclo, (heterocyclo)alkyl, heteroaryl or (heteroaryl)alkyl;
[0613] T¹² is halo, cyano, nitro, OH, oxo, —SH, alkyl, (hydroxy)alkyl, (alkoxy)alkyl, alkenyl, alkynyl, cycloalkyl, (cycloalkyl)alkyl, cycloalkenyl, (cycloalkenyl)alkyl, aryl, (aryl)alkyl, heterocyclo, (heterocyclo)alkyl, heteroaryl or (heteroaryl)alkyl, —C(O)ₜH or —SO₃H;
[0614] T¹³ and T¹⁴ are each independently a single bond, —S(O)ₜ—, —C(O)—, —C(S)—, —O—, —S—, —O—C (O)—, —C(O)ₜ—, —C(═NT¹³)— or —C(O)—C(O)—; and
[0615] t is 1 or 2.

[0616] More preferred methods/compounds use/are:
[0617] A is hydrogen, deuterium, methyl, —CH₂(CH₃)₂, —(CH₂)₂(CH₃)₂, —CH(CH₃)CH₂(CH₃), —(CH₂)OH, hydroxyethyl, —(CH₂)₂SCH₃, —CH₂SH, phenyl, —CH₂(phenyl), —CH₂(p-hydroxyphenyl), —CH₂(indole), —(CH₂)C(O)NH₂, —(CH₂)₂C(O)NH₂, —(CH₂)₂C(O)OH, —CH₂C(O)OH, —(CH₂)₄NH₂, —(CH₂)₃(═NH)CNH₂ or —CH₂(imidazole).

[0618] Especially preferred methods/compounds use/are:
[0619] A is —CH(CH₃)CH₂(CH₃), phenyl, CH₂(phenyl) or —CH₂(2-indole).

[0620] Also, especially preferred methods/compounds use/are:
[0621] R⁸ is hydrogen and the configuration about the carbon marked with the * is S, provided A is not H. Also preferred: R8 is deuterium and the configuration about the carbon marked with the * is S, provided A is not H or deuterium.

[0622] Other preferred methods/compounds use/are:
[0623] R1 and R⁵ are both isopropyl; and/or R⁶R⁷ and R⁹ are all hydrogen; and/or Z is CH₂(phenyl), —C(O)₂H or —C(O)₂C₁₋₈alkyl.

[0624] Some example embodiments of Formula (IV)

[0625] In the following scheme, Scheme X, all reactants are commercially available e.g. Compound 1 from Matrix Scientific, Columbia, SC, USA, Compound 2 from Oxchem Corporation, IL, USA, Compound 4A from Astatech Inc., Bristol PA, USA, Compound 4B from Apollo Scientific Ltd., Stockport, UK.

[chemical structure]

[0626] Using Scheme X, above, with different amino acids as the Compound 2 input, gives different Compound 5 products. Non-limiting illustration follows: Compound 2b is available from Aurora Fine Chemicals LLC, San Diego, USA, Compounds 2c, 2d, 2f (CAS number: 54793-54-3), 2g (CAS: 136056-01-4), 2i (L-lysine), 2j (CAS Number: 169524-86-1), 2k (607665 ALDRICH) are available from Sigma-Aldrich, Compound 2h (CAS: 91037-48-8) from Cambridge Isotope Laboratories:

[chemical structure]

[chemical structure]

[chemical structure]

[chemical structure]

[chemical structure]

[chemical structure]

[chemical structure]

[chemical structure]

[0627] In preferred embodiments, the S stereoisomer product of Scheme X is in enantiomeric excess, optionally because the Compound 2 input into Scheme X has enantiomeric excess of S stereoisomer. To illustrate, with histidine (available from Sigma-Aldrich) as Compound 2 input,

[chemical structure]

[0628] Where the amino acid side chain contains an NH group it can optionally be protected as a first step, preferably using a protecting group with some degree of specificity for an amine over an alcohol group, and for a secondary (NH) over primary (NH₂) amine, wherein greater specificity is more favoured. Or using an amine protecting group (or chemical reaction/modification e.g. [non-limiting] refer [149-150]) with some degree of specificity for a primary over secondary amine, then protecting the secondary amine with a different protecting group, then removing the first protecting group (or reversing the chemical reaction/modification of primary amine) with conditions that don't remove the second protecting group. Thence a protection group on the NH group of the amino acid side chain, and not on the NH₂ and OH of the amino acid, is extant. This judicious use of protecting groups is inherent to one of the art e.g. refer Greene et al., Protective Groups in Organic Synthesis, 3^{rd} Ed., Wiley-Interscience, 1999 (or later edition). Alternatively one can use an amino acid starting material with desirable protections incorporated, for example the starting material, a protected form of L-histidine (CAS: 274927-61-6), in the scheme below is available from multiple suppliers on www.Labnetwork.com e.g. Astatech Inc., Bristol PA, USA

[chemical structure]

[0629] An illustrating, non-limiting, judicious use of protecting groups is shown below, wherein Compound 1 is available from Sigma-Aldrich (609226) and the remaining starting compounds from suppliers listed on www.labnetwork.com: Compound 2 (Fluorochem, Hadfield, Derbyshire, UK), Compound 5 (Astatech Inc., Bristol PA, USA), Compound 9 (Matrix Scientific, Columbia, SC, USA) and Compound 12 (Alfa Aesar, Shanghai, China).

[chemical structure]

[chemical structure]

[0630] For Scheme IVe below, starting compounds can be sourced from suppliers listed on labnetwork.com, e.g. Compounds 1, 2, 4 can be sourced from Astatech Inc., Bristol PA, USA.

[chemical structure]

[0631] For Scheme IVf below, starting compounds can be sourced from suppliers listed on labnetwork.com, e.g. Compounds 1, 2, 4, 7 can be sourced from Astatech Inc., Bristol PA, USA.

[chemical structure]

[chemical structure]

[0632] Other example embodiments (each structure a separate embodiment):

[chemical structure]

[chemical structure]

[chemical structure]

### Example (V)

### Formula (V)

[0633] Herein incorporated by reference, in its entirety, is Formula (V), and example embodiments thereof, from PCT/EP2018/069175 (published as WO2019/012149A1).

### Example (VI)

[0634] Encompassed by this embodiment are methods of treating a subject suffering from cancer by administering an effective amount of at least one compound of Formula (VI) or a pharmaceutically-acceptable salt, solvate, hydrate or prodrug thereof, or a pharmaceutical composition(s) comprising one or compounds of Formula (VI).

### Summary of Formula (VI)

[0635] This disclosure embodiment relates to compounds having the following formula: Formula (VI)

[chemical structure]

[0636] or a pharmaceutically-acceptable salt, solvate, hydrate or prodrug thereof, wherein:
[0637] each Q^{A} is independently selected from N and CH;
[0638] each Q^{B} is independently selected from O, S, Se, NH, CH₂, NR^{W}, PR^{W}, BR^{W}, C(R^{W})₂ and Si(R^{W})₂;
[0639] each M is independently selected from O, S, Se, NH, CH₂, NR^{W}, PR^{W}, BR^{W}, C(R^{W})₂ and Si(R)₂;
[0640] each R^{W} is independently selected from hydrogen, deuterium, halogen (e.g. F), alkyl, or substituted alkyl (non-limiting examples: CF₃, CCl₃), or deuterated alkyl (non-limiting example: CD3), or aminoalkyl, or thioalkyl, or alkoxy, or halogen, or haloalkyl, or haloalkoxy;
[0641] x^{a} is independently at each point of use selected from 1, 2, 3, 4, or 5; x^{b} is independently at each point of use selected from 0, 1, 2, 3, 4, or 5; LA represents 0-5 optional substituents on the ring independently selected from alkyl, substituted alkyl, deuterated alkyl, aminoalkyl, thioalkyl, alkoxy, halogen, haloalkyl, haloalkoxy, or any atom or isotope permitted by valence (including any accompanying hydrogens by valence e.g. (non-limiting) OH, NH₂, SH, SiH₃, PH₂ etc.);
[0642] R^{A1} and R^{A2} are each independently selected from the groups

[chemical structure]

[0643] wherein R^{C} and R^{D} are each independently selected from hydrogen, deuterium, halogen and alkyl, and
[0644] wherein R^{E} is hydrogen, deuterium, halogen or alkyl;
[0645] R^{B} is selected from R^{B1}, hydrogen and deuterium;
[0646] wherein R^{B1} is selected from phenyl, benzyl, heteroaryl, pyridyl, pyrimidyl and pyrazinyl optionally substituted independently with one or more substituents of R^{B2};
[0647] wherein each R^{B2} is independently selected from halogen, alkyl, substituted alkyl, deuterated alkyl, alkoxy, nitro, amino, methoxy, haloalkyl, polyhalogen alkyl, aminoalkyl, thioalkyl, alkoxy, haloalkoxy, and any atom or isotope permitted by valence (including any accompanying hydrogens by valence e.g. (non-limiting) OH, NH₂, SH, SiH₃, PH₂ etc.); or R^{B} is a phenylalkyl of the formula:

[chemical structure]

[0648] wherein R^{F} and R^{G} are hydrogen or alkyl, G is a carbon-carbon double bond or a carbon-carbon single bond, n is 0 or 1 and q is 0 or 1 provided that where q is 0, G is a carbon-carbon double bond and where q is 1, G is a carbon-carbon single bond, or R^{B} is a diphenylalkyl of the formula

[chemical structure]

[0649] wherein R^{H1} and R^{H2} each independently represent 1-5 optional substituents on each ring, and wherein each R^{H1} and R^{H2}, when present, is independently selected at each point of use from hydrogen, deuterium, halogen, alkyl, substituted alkyl, deuterated alkyl, alkoxy, nitro, amino, methoxy, haloalkyl, polyhalogen alkyl, aminoalkyl, thioalkyl, alkoxy, haloalkoxy, and any atom or isotope permitted by valence (including any accompanying hydrogens by valence e.g. (non-limiting) OH, NH₂, SH, SiH₃, PH₂ etc.), and p is 0, 1, 2 or 3; or R^{B} is the group

[chemical structure]

[0650] Wherein G^{T} and G^{U} are each independently selected from a single bond, O, S, NR^{V} or C(R^{V})₂, wherein each R^{V} is independently selected from hydrogen, deuterium, alkyl, substituted alkyl (non-limiting examples: CF₃, CCl₃), deuterated alkyl (non-limiting example: CD₃), aminoalkyl, thioalkyl, alkoxy, halogen (e.g. F), haloalkyl, haloalkoxy;
[0651] u and t are each independently selected from 0, 1, 2, 3 and 4;
[0652] Q is C, CH or N, R^{J} and R^{K} each independently represent 1-5 optional substituents on each ring, and wherein each R′ and each R^{K}, when present, is independently selected from deuterium, halogen, alkyl, substituted alkyl, deuterated alkyl, alkoxy, haloalkoxy, methoxy, nitro, amino, aminoalkyl, thioalkyl, haloalkyl, polyhalogen alkyl, and any atom or isotope permitted by valence (including any accompanying hydrogens by valence e.g. (non-limiting) OH, NH₂, SH, SiH₃, PH₂ etc.);
[0653] L is absent (when Q is N), alkyl, or substituted alkyl, or deuterated alkyl, or aminoalkyl, or thioalkyl, or alkoxy, or halogen, or haloalkyl, or haloalkoxy, or hydroxyalkyl, or any atom or isotope permitted by valence (including any accompanying hydrogens by valence e.g. (non-limiting) OH, NH₂, SH, SiH₃, PH₂ etc.).

[0654] In some embodiments, when one or both of R^{J} and R^{K} is alkoxy, this alkoxy group may be methoxy.

[0655] It is to be understood that in the compounds of general Formula (VI), wherein R^{A1} and/or R^{A2} are alkenyl moieties having different substituents at the position RC and R^{D}, that compound may exist in cis or trans isomeric forms both of which are considered to be within the scope of the present disclosure. All isotopic, including radionuclide, forms of Formula (VI) are within the scope of the present disclosure.

### Some Preferred Embodiments of Formula (VI)

[0656] For Formula (VI), the symbols RC and R^{D}, as defined in subgroups R^{A1} and R^{A2}, may be hydrogen, halogen (suitably fluorine, chlorine or bromine), alkyl, suitably “lower alkyl” (herein now defined) having from 1 to 5 carbon atoms, such as methyl, ethyl, propyl, isopropyl, butyl, isobutyl, tert butyl, pentyl and the like, most preferably methyl;
[0657] and the moiety RE may be hydrogen, or lower alkyl having from 1 to 5 carbon atoms such as methyl, ethyl, propyl, butyl, or pentyl, most suitably methyl.

[0658] The subgroup R^{B} may be hydrogen; phenyl; or substituted phenyl. The substituted phenyl group may include one or more of the preferred substituents in any of the available positions for substitution, however, mono substitution in the 4-position of the phenyl nucleus is especially preferred. Suitable substituents for the phenyl nucleus include halogen, preferably fluorine, chlorine or bromine; lower alkyl, lower alkoxy, and poly halogen lower alkyl (i.e, substituted alkyl) wherein the alkyl moiety contains from 1 to 5 carbon atoms, especially preferred however are methyl, methoxy, trifluoromethyl, nitro and amino. Where the subgroup R^{B} represents substituted pyridyl, substituted pyrimidyl, or substituted pyrazinyl, the substituting group may be located on one or more of the available carbon atoms in the nucleus, and may be the same or different. Preferred among the substituting groups are lower alkyl or lower alkoxy having from 1 to 5 carbon atoms such as methyl, ethyl, butyl or penty; or methoxy, propoxy, butoxy or pentoxy. Where the moiety R^{B} represents substituted benzyl, the benzyl moiety may be substituted in one or more of the available positions on the phenyl nucleus thereof. Among the preferred substituents are halogen (suitably fluorine, chlorine or bromine), lower alkoxy having from 1 to 5 carbon atoms, especially preferred is methoxy and most preferred being di- and tri-methoxy; or alkylenedioxy suitably lower alkylenedioxy such as methylenedioxy, ethylenedioxy, propylenedioxy and the like, most suitably, the alkylenedioxy moiety is attached across the 3- and 4-positions of the phenyl nucleus, although the bridging of other carbon atoms in the phenyl nucleus is to be considered within the scope of the present disclosure.

[0659] The moieties R^{F} and R^{G} may be hydrogen, or lower alkyl of 1 to 5 carbon atoms, most preferred however being methyl.

[0660] The groups R^{H1} and R^{H2} may be independently hydrogen, or halogen suitably fluorine, chlorine or bromine.

[0661] Preferred embodiments of Formula (VI) include wherein R^{C} and R^{D} are methyl, R^{E} is methyl and R^{B} is selected from chlorophenyl, methylphenyl, methoxyphenyl, trifluorophenyl, chlorophenyl, dimethoxybenzyl, trimethoxybenzyl, methylenedioxybenzyl and ethylenedioxybenzyl.

[0662] In some embodiments R^{B} is the group

[chemical structure]

[0663] In some embodiments, R^{B} is the group

[chemical structure]

[0664] wherein R^{L} and R^{M} are each independently selected from halogen, alkyl, alkoxy, nitro, amino and polyhalogen alkyl.

### Almitrine as an Anti-Cancer Medicine

[0665] Almitrine is especially valuable against a cancer that can/does disrupt/impair breathing (e.g. lung cancer, cancer in the lung, primary lung cancer or a cancer that has spread/metastasized to the lungs and/or chest area, mesothelioma, cancer causing one or more of pleural effusion, pulmonary oedema, ascites) and/or that causes dyspnea (50-70% of cancer patients have this symptom at some time during their illness, 90% for patients with advanced lung cancer, source: https://www.cancerresearchuk.org/about-cancer/coping/physically/breathing-problems/shortness-of-breath) and/or that reduces O₂ delivery to tissues.

[0666] In rats, radioactively labelled 14C-almitrine is especially accumulated in the lungs [151], and to a lesser degree, the caratoid body. Therefore, in some disclosure embodiments, almitrine or a pharmaceutically-acceptable salt, solvate, hydrate or prodrug thereof is especially suited, without limitation, to treating/ameliorating/preventing/combating
[0667] (a) lung cancer(s) such as, without limitation, Small Cell Lung cancer (SCLC), Non-Small Cell Lung Cancer (NSCLC), small-cell lung carcinoma (SCLC), non-small-cell lung carcinoma (NSCLC, including, without limitation, adenocarcinoma of the lung, bronchioloalveolar lung cancer, bronchioloalveolar carcinoma, squamous-cell carcinoma of the lung, large-cell lung carcinoma, pleomorphic, carcinoid tumor, salivary gland-like carcinoma, unclassified carcinoma, rhabdoid carcinoma, sarcomatoid carcinoma, adenosquamous carcinoma, papillary adenocarcinoma, giant-cell carcinoma, an admix of NSCLC types, “not otherwise specified” type), combined small-cell lung carcinoma (c-SCLC), pancoast tumors, carcinoid tumors, bronchial gland carcinomas, sarcomatoid carcinomas and non-carcinomas (such as, without limitation, sarcoma, lymphoma, immature teratoma, melanoma), a cancer(s) listed in [152], cancer(s) in a bronchus/bronchi, bronchial adenoma;
[0668] (b) cancer(s) of the caratoid body, such as carotid paraganglioma (carotid body tumor), and/or a liver cancer(s) such as hepatocellular carcinoma, cholangiocarcinoma, hepatoblastoma and/or a kidney cancer(s) such as renal cell carcinoma (RCC), renal oncocytoma, transitional cell carcinoma (TCC), squamous cell carcinoma, juxtaglomerular cell tumor (reninoma), angiomyolipoma, Bellini duct carcinoma, clear-cell sarcoma of the kidney, mesoblastic nephroma, metanephric adenoma, cystic nephroma, Wilms' tumor, mixed epithelial stromal tumor and/or a heart cancer(s) (primary and/or secondary) such as papillary fibroelastoma, rhabdomyoma, angiosarcoma, teratoma, cystic tumour of the atrioventricular nodal region and/or a cancer of the adrenal gland such as adrenocortical adenoma, adrenocortical carcinoma, neuroblastoma, pheochromocytoma, and paraganglioma.

[0669] An embodiment(s) of this disclosure is administering a compound of Formula (VI), optionally almitrine, and/or a pharmaceutically-acceptable salt, solvate, hydrate or prodrug thereof to a subject with cancer, optionally lung cancer and/or mesothelioma of the lung, wherein this subject has difficulty breathing and/or has low blood pO₂ (hypoxia) and/or high blood pCO₂ and/or Chronic Obstructive Pulmonary Disease (COPD) and/or Acute Respiratory Distress Syndrome (ARDS) and/or Severe Acute Respiratory Distress Syndrome (SARDS) and/or Severe Acute Respiratory Syndrome (SARS) and/or virus and/or coronavirus (e.g. Betacoronavirus, SARS-COV, SARS-COV-2 [cause of COVID-19], MERS-COV, HCoV-NL63, coronavirus that can infect humans etc.) infection and/or is undergoing (or will undergo or has undergone) surgery including anti-cancer surgery including surgery to remove lung cancer including surgery to remove part or the entirety of a lung (pneumonectomy) including open-chest thoracic surgery (thoracotomy) including open-chest one lung ventillation, optionally in co-administration with (e.g. inhalation of) Nitric Oxide, NO (illustratively, not restrictively, NO at 10 parts per million [p.p.m]) and/or hyperbaric O₂ therapy (oxygen therapy/supplemental oxygen) and/or mechanical/assisted ventilation (artificial invasive/non-invasive assistance to support breathing) and/or extracorporeal membrane oxygenation and/or anti-viral treatment(s) (e.g. anti-viral treatment for a coronavirus infection). Many cancer (e.g. some chemo-/radio-) therapies impair the immune system, as can cancer itself (e.g. leukemia e.g. AML), and so subjects with cancer, especially those undergoing immunocomprimising cancer treatment(s) (e.g. alkylating/-platin chemotherapy), are at increased risk during an epidemic/pandemic. Almitrine does not immunosuppress and so is a favoured anti-cancer therapy for use during an epidemic/pandemic, when cancer patients require as much immune function as possible. Moreover, in the case of a coronavirus (e.g. SARS-COV-2), which can cause breathing difficulty, the respiratory stimulation that almitrine causes is very clinically useful (almitrine increases pO₂, and decreases pCO₂, in the blood and tissues [153, 154]). Indeed, a danger of a coronavirus (e.g. SARS-COV-2) is that it can cause Severe Acute Respiratory Distress Syndrome (SARDS) [155], wherein almitrine is actually used (and has been used for decades) clinically for treating Acute Respiratory Distress Syndrome (ARDS) [156], and more generally for “hypoxaemia and hypercapnia associated with alveolar hypoventilation” [157], showing efficacy with Severe Acute Respiratory Distress Syndrome (SARDS) [158]. An effective amount (e.g. therapeutically effective amount) of almitrine (and/or a pharmaceutically-acceptable salt, solvate, hydrate or prodrug thereof) can optionally be administered to a subject as a supplement to their oxygen and/or nitric oxide therapy and/or mechanical/assisted ventilation and/or extracorporeal membrane oxygenation, and/or as an assist to transitioning a subject off one or more of these, and/or as a substitute for one or more of these, and/or rendering a subject's hospitalization shorter (the subject's need for a hospital machine(s)/care is delayed and/or shortened) or unrequired. This is especially useful during an epidemic/pandemic when there might not be enough hospital machines/beds for everyone with need. Moreover, hospitals can be a hub of coronovirus spread. Disproportionally to those least fit to endure it, and to key healthcare workers also, which is a vicious combination. So keeping subjects with (or suspected to have, or at risk of, or particularly vulnerable to) coronavirus out of hospital as much as possible, either by delaying their admission, expediting their discharge or mitigating their need for hospitalization, is valuable. Also, being a drug with such a low side-effect profile, especially when taken short-term (daily for <11 months) [159], almitrine can be taken with atypically limited medical oversight if access to a Doctor(s) becomes atypically limited. Also contemplated by this disclosure is the administration of almitrine (and/or a pharmaceutically-acceptable salt, solvate, hydrate or prodrug thereof), and/or other respiratory stimulant drug (non-limiting e.g. doxapram and/or a pharmaceutically-acceptable salt, solvate, hydrate or prodrug thereof), to a subject, without cancer, but who has (or is suspected to have, or who is at risk of, or particularly vulnerable to) a coronavirus (e.g. SARS-COV-2) infection, optionally in co-therapy with Nitric Oxide (NO) treatment (e.g. via inhalation) and/or an anti-viral drug(s) (non-limiting e.g. one or more of Remdesivir, Lopinavir, Ritonavir), optionally wherein almitrine (and/or a pharmaceutically-acceptable salt, solvate, hydrate or prodrug thereof) and an anti-viral drug(s) is in the same pharmaceutical composition. Almitrine can be used to transition subjects off mechanical/assisted ventilation [157], and so if employed during the COVID-19 crisis, and/or other virus/coronavirus crisis, it can free up ventilator machines quicker, and head off the need for a ventilator machine in more minor cases, buying time to be allocated a ventilator machine in more serious cases. This will ease the most dangerous (projected) pinch point of the COVID-19 crisis: not enough ventilator machines for those that need them. Almitrine or a pharmaceutically-acceptable salt, solvate, hydrate or prodrug thereof is especially suited to treating lung cancer because it exerts anti-cancer activity, thence fundamentally treating the symptoms of lung cancer, and concurrently directly treats the shortness of breath/beathlessness symptom of lung cancer. Without limitation to any mechanism(s), the former action is by almitrine effect upon ATP synthase in cancer cells, the latter action is by almitrine effect upon BK potassium channels in the caratoid bodies, wherein this latter action also exerts anti-cancer activity, adding/potentiating with the first, because it increases tissue pO₂ and thence ROS production. Elegantly, almitrine both increases ROS (by increasing blood and tissue pO₂) and decreases ROS mitigation, especially in cancer cells (by slowing F₁F₀ ATP hydrolysis).

[0670] Physiologically, hypoxia in part of a lung (perhaps because of lung damage and/or fluid in that part) causes vasoconstriction in this lung part (“hypoxic pulmonary vasoconstriction”). So that more blood can flow instead to other lung parts that actually have appreciable O₂ to deliver to the blood. This vasoconstriction increases pulmonary tension. Pharmacologically, almitrine helps and increases this process. So increasing pO₂, and decreasing pCO₂, in the blood and tissues. Inherently increasing pulmonary tension, which can be problematic [160]. Breathable Nitric Oxide (NO) can be co-administered with almitrine [177]. NO is a vasodilator. NO, when incorporated in the breathing mixture, only reaches the lung parts that O₂ reaches. So, it only vasodilates the lung parts that are well ventillated with O₂. So,
[0671] (1) Almitrine specifically vasoconstricts only hypoxic lung regions, shunting more blood to well ventillated lung regions.
[0672] (2) Breathed NO only reaches well ventillated lung regions and so specifically vasodilates only well ventillated lung regions.

[0673] Thence points (1) and (2) additively increases PaO₂ [177]. Incidentally, whilst point (1) increases pulmonary tension, point (2) decreases pulmonary tension, and so with almitrine and NO co-administration there is partial/complete cancelling of their opposing pulmonary tension effects, with concurrent addition of their beneficial increase in PaO₂ [177]. Componentry to this disclosure is to co-administer almitrine (and/or a pharmaceutically acceptable salt, solvate, hydrate or prodrug thereof; non-limiting e.g. intravenous and/or oral) with breathed NO to a subject, optionally wherein this subject has cancer, wherein the breathed NO permits a higher almitrine dose(s), conferring greater anti-cancer activity, to be administered to the subject because the breathed NO counteracts an almitrine conferred increase in pulmonary tension. Wherein a higher NO dose can permit a higher almitrine dose. Also componentry to this disclosure is to co-administer almitrine (and/or a pharmaceutically acceptable salt, solvate, hydrate or prodrug thereof; non-limiting e.g. intravenous and/or oral) and breathed NO, optionally along with assisted ventillation and/or hyperbaric oxygen, to a subject infected with at least one coronavirus, optionally SARS-COV-2, optionally to treat/ameliorate/prevent/combat a coronavirus driven/associated/correlated respiratory disorder(s), optionally Severe Acute Respiratory Syndrome (SARS) and/or Severe Acute Respiratory Distress Syndrome (SARDS). Also contemplated by this disclosure is almitrine (and/or a pharmaceutically acceptable salt, solvate, hydrate or prodrug thereof) administered to a subject by their inhalation/breathing, optionally along with Nitric Oxide (NO) and/or O₂ and/or a breathing mixture that can sustain a subject.

[0674] Oral almitrine dimesylate (100-200 mg) was administered to human COPD patients daily for a year [151]. In a minority, peripheral neuropathy started to manifest (5 times higher incidence in almitrine than control group) by 7 months on average. Subjects with greatest plasma [almitrine] were most at risk. Averaged, those presenting peripheral neuropathy in the study year had plasma [almitrine] of 344 and 617 ng/ml at 3 and 12 months respectively, those that didn't had plasma [almitrine] of 249 and 387 ng/ml at 3 and 12 months respectively. The suggested optimal long term mean (not peak) plasma [almitrine] for treating COPD, without inducing neuropathy, is in the 200-300 ng/ml range [151, 161]. Almitrine has a long half-life in the human body. When daily almitrine intake exceeds daily almitrine elimination from the body, as it does with ≥100 mg oral almitrine dimesylate dosed per day [162], there is fractional compounding of daily doses, which drives higher plasma [almitrine] over time, until an eventual point (between day 90 and day 180 with the 100 mg administered in [162]) when plasma [almitrine] stops increasing and stabilizes. If the almitrine dimesylate daily dose is sufficiently high (≙100 mg and more surely ≥200 mg), peripheral neuropathy can occur in the minority of COPD subjects that eliminate almitrine most poorly, who have greatest compounding of almitrine daily doses, and in which the greatest mean and trough plasma [almitrine] occurs (trough refers to the lowest drug concentration between two doses). Wherein it still typically takes months, on 100-200 mg almitrine dimesylate daily, for this fraction of COPD subjects to accumulate enough almitrine in their body to cause peripheral neuropathy [161]. The majority of COPD subjects don't accumulate such an amount with clinically used almitrine doses (50 to 200 mg oral almitrine dimesylate per day), at least for the length of periods that have been studied, which is months to years. So peripheral neuropathy is a dose-dependent side-effect, wherein the overwhelming majority of COPD subjects administered, even with 200 mg oral almitrine dimesylate daily, don't accumulate sufficient [almitrine] in their body for it to occur. Almitrine administered subjects suffering paraesthesiae/peripheral neuropathy must already have a high almitrine concentration in their body, which is enough to exert significant anti-cancer activity in subjects with cancer. For these subjects, the solution is just to stop/reduce their almitrine daily dosage. The almitrine concentration in their body will then decrease, and the paraesthesiae/peripheral neuropathy with it. Afterwards, optionally, their almitrine dosing can be restarted, optionally at a lower (e.g. daily) dosage. This is a reactionary dosage regime. Alternatively a “proactive dosage regime” can be used. Wherein the administered daily dosage of almitrine, or a pharmaceutically-acceptable salt, solvate, hydrate or prodrug thereof, is decreased over the treatment course, by some function of time since treatment start (non-limiting e.g. 200 mg almitrine dimesylate administered per day for 1st month, 100 mg per day in subsequent month(s)), and/or the course of administration has pauses or rest periods, wherein less or no almitrine is administered (non-limiting example: a repeating cycle of [2 months almitrine administration, 1 month none]). Optionally the almitrine administration dosage/regime can be individually tailored to the almitrine elimination parameters of each individual subject. When deciding the almitrine dosage/regime to administer, the duration of the administration course should be a principal consideration. Wherein if the course is short, e.g. for days to weeks, it is probable that constantly high daily almitrine concentrations (e.g. 200 mg oral almitrine dimesylate per day) will not produce significant side-effects in most to all subjects. Indeed, 400 mg oral almitrine dimesylate per day is safe, in healthy subjects at least [163], at least over the short term. For longer courses of almitrine administration (non-limiting e.g. >3 months), to protect the minority of subjects susceptible to associated peripheral neuropathy, a “proactive dosage regime”, as prior defined, can be used, and/or a lower almitrine dose. Illustratively, in human COPD patients, 75 mg oral almitrine dimesylate administered daily for 6 months produced no adverse effects in any of the study subjects, wherein at study end, the average of the trough (lowest between doses) plasma [almitrine] in the subjects was 302 ng/ml. In human COPD patients, administered 100 mg oral almitrine dimesylate daily for 2 months, then 1 month with no administration, and this cycle was repeated for 1 year, at the end of which the mean plasma [almitrine] was 285 ng/ml, and the authors mention that “there is a close relationship between the almitrine [mean or trough I would specify] plasma level and the occurrence of side-effects such as peripheral neuropathies”, concluding that their regime is safe. In human COPD patients, administered 50 mg almitrine dimesylate twice daily (i.e. 100 mg per day) for 8 weeks and, before the morning dose, plasma [almitrine] was on average across the subjects: 93, 134, 148, 171 ng/ml on days 14, 28, 42, 56 respectively, and 104 ng/ml 2 weeks after the study. In different human COPD patients, administered 100 mg almitrine dimesylate twice daily (i.e. 200 mg per day) for 8 weeks and, before the morning dose, plasma [almitrine] was on average across the subjects: 268, 409, 442, 572 ng/ml on days 14, 28, 42, 56 respectively, and 311 ng/ml 2 weeks after the study. In human COPD patients, over long term, two 50 mg doses of oral almitrine dimesylate per day results in plasma [almitrine] that is 2 to 3 times higher than a single 100 mg oral dose [167], so dividing the daily dose can make a big difference. In human COPD patients, administered 100 mg oral almitrine dimesylate daily for 1 year and at year end mean plasma [almitrine] was 409.35 ng/ml, trough plasma [almitrine] was 301.8 ng/ml (doesn't comment on any side-effects observed or lack thereof, was a purely pharmacokinetic study). In human COPD patients [168], 100 mg oral almitrine dimesylate daily for 1 year increased the occurrence, compared to placebo control, of a nervous system disorder by 4%, paraesthesia by 5% and polyneuropathy by 3.6%.

[0675] The way almitrine exerts anti-cancer activity it is suited to treat chemoresistant and/or radioresistant cancer(s) (e.g. lung cancer [s]) because it undermines a mechanism by which these cancers have radio- and/or chemo-resistance. In some embodiments, a compound of Formula (VI), optionally almitrine, or a pharmaceutically-acceptable salt, solvate, hydrate or prodrug thereof is used as an adjuvant or neoadjuvant to another cancer treatment(s) e.g. used as an adjuvant to chemo and/or radiotherapy e.g. used as a chemosensitizer and/or radiosensitizer/radioenhancer. Many conventional [chemo/radio] therapies act against cancer, wholly or in part, by increasing [ROS]. Indeed, radiotherapy and chemotherapy [170, 171, 172] increase [ROS] in cancer cells. A mechanism that cancers use to mitigate and counteract this [ROS] increase is greater F₁F₀ ATP hydrolysis, consuming ATP, which releases glycolysis from ATP feedback inhibition, permitting higher glycolytic and pentose phosphate pathway rate, more NADPH produced and thence greater ROS mitigation. Almitrine slows F₁F₀ ATP hydrolysis, reducing ROS mitigation and this assists the anti-cancer activity of chemo/radio therapy. Almitrine also increases blood and tissue pO₂, increasing ROS production. So, almitrine combats tumor hypoxia, wherein this hypoxia can be a drive to radio-[169] and chemo-[173-174] resistance of cancer. In some embodiments the anti-cancer activity of almitrine or a pharmaceutically acceptable salt, solvate, hydrate, prodrug thereof, synergizes with (potentiates) the anti-cancer activity of an FDA and/or EMA approved anti-cancer treatment(s) e.g. one or more of chemotherapy, radiotherapy, immunotherapy, surgery, immuno-oncology, radioimmunotherapy, biological therapy, hormone therapy etc. In other words, in some embodiments, the combined anti-cancer effect of almitrine and another cancer treatment(s) is greater than the sum of each alone. In some embodiments, almitrine administration enables the same or greater anti-cancer activity to be exerted by another anti-cancer treatment(s) but with lower radiative (e.g. x-ray, y ray, electromagnetic radiation, radioactivity etc.) and/or drug(s) exposure, e.g. lower radio- and/or chemo-therapeutic(s) dose, most preferably enabling a lower side-effect profile. Encompassed herein is a method of reducing, treating and/or preventing adverse or undesired effects associated with conventional therapy including, but not limited to, chemotherapy, radiotherapy, immunotherapy, wherein almitrine or a pharmaceutically acceptable salt, solvate, hydrate, prodrug thereof, is administered to a subject prior to, during, or after the occurrence of the adverse effect associated with conventional therapy, optionally wherein the dosage/frequency/use of the conventional therapy is decreased. In some embodiments, almitrine is used in co-therapy with cisplatin and/or carboplatin and/or some other platinum based therapeutic(s) for anti-cancer treatment in a subject, and in further embodiments their anti-cancer activities synergize. In some embodiments, almitrine or a pharmaceutically-acceptable salt, solvate, hydrate or prodrug thereof is used in co-therapy with radiotherapy for anti-cancer treatment in a subject, and in further embodiments their anti-cancer activities synergize. In some embodiments, almitrine or a pharmaceutically-acceptable salt, solvate, hydrate or prodrug thereof is administered alongside radiotherapy to treat radioresistant cancer(s) and/or alongside chemotherapy to treat chemoresistant cancer(s).

[0676] Almitrine or a pharmaceutically-acceptable salt, solvate, hydrate or prodrug thereof can be administered exactly or approximately matching, or some function of, the pattern of administration of one or more of chemo- and/or radio-therapy given to the subject, wherein almitrine will add/synergize with their anti-cancer effects. To illustrate, a disclosure embodiment is to administer almitrine or a pharmaceutically-acceptable salt, solvate, hydrate or prodrug thereof (oral and/or injected) every day that radiotherapy is administered, wherein illustrative (not restrictive) courses of radiotherapy are to administer it every week day (one or more times) for a period that can vary between 3 to 9 weeks, or 3 times per day for 12 days (continuous hyperfractionated accelerated radiotherapy, CHART) or (especially with stereotactic radiotherapy) 3 to 8 times over 2 to 3 weeks, or accelerated fractionation, or hyperfractionation, or hypofractionation radiotherapy administration schemes. In further embodiments, almitrine or a pharmaceutically-acceptable salt, solvate, hydrate or prodrug thereof is also administered (oral and/or injected) at weekends during a weekday radiotherapy course, and/or during pauses in radiotherapy treatment and/or is administered (oral and/or injected) for a further period of administration flanking one or both sides of a radiotherapy treatment period. In some embodiments, almitrine or a pharmaceutically-acceptable salt, solvate, hydrate or prodrug thereof is administered during a period before and/or during and/or after anti-cancer surgery.

[0677] The i.v. dose of almitrine used in clinical practice at King's College Hospital (London, UK) is 8 μg/kg/min for COPD and 4-16 μg/kg/min for Acute Respiratory Distress Syndrome (ARDS) [156]. Intravenous, as opposed to oral, administration of almitrine or a pharmaceutically-acceptable salt, solvate, hydrate or prodrug thereof can be advantageous for anti-cancer therapy in a subject, especially in clinical trialing, because subject variability in oral bioavailability of almitrine is rendered irrelevant. An aspect to this is that, unlike oral administration, i.v. dosing, if sufficiently large, permits one to know precisely when peak plasma [almitrine] occurs in each subject. It being at the final time point of i.v. administration. This is useful when almitrine or a pharmaceutically-acceptable salt, solvate, hydrate or prodrug thereof is administered with radio- and/or chemo-therapy and maximal therapeutic synergy is desired. For example, if radiotherapy can't be administered during, it should be administered as soon as possible after, the i.v. administration of almitrine or a pharmaceutically-acceptable salt, solvate, hydrate or prodrug thereof. The shorter the delay between the end of i.v. almitrine administration and the start of radiotherapy, the more preferred the embodiment. Most preferred is the delay is zero and they are concurrent. During concurrent administration, radiotherapy preferably starts after the start of i.v. almitrine administration, to permit a build up of [almitrine] in the tissues before radiotherapy commences.

[0678] In humans, infused ˜7.47 ug/kg/min for 2 hours, delivering 60 mg almitrine dimesylate, wherein the mean almitrine plasma level in the subjects was 327 ng/ml at the end of the infusion period (lowest observed=242 ng/ml), which then fell to 157, 154, 105, 67, 55 ng/ml, at 15, 30, 60, 120, 600 minutes afterwards respectively. In humans, infused 8 μg/kg/min for 20 minutes during which the mean plasma concentration of almitrine was 325 ng/ml. In humans, [176] infused 8.3 μg/kg/min for 30 minutes, wherein “no adverse side-effect was observed during or after the administration of almitrine”. In humans, [177] infused 16 μg/kg/min for 1 hour, during which plasma almitrine concentration rose to be greater than 600 ng/ml in all subjects, much greater in some subjects (˜1,600 ng/ml highest observed), and by 2 hours after the infusion stopped, this had fallen to below 400 ng/ml in all subjects but one, and by 12 hours was below 200 ng/ml in all. In humans, infused 16.7 ug/kg/min for 1 hour “without deleterious effects”. In humans, infused 16 μg/kg/min and 20 minutes into this infusion the mean plasma concentration of almitrine was 659 ng/ml, wherein “plasma lactate concentrations remained within the normal range in all patients”. There are many more human studies in the literature wherein ˜16 or 16 μg/kg/min is infused, and many more wherein less is infused. Someone of the art will know how to find all these. A fraction, but by no means all, are listed and usefully compared in a table in [157]. In humans, infuses a higher rate than ˜16 μg/kg/min, =25 μg/kg/min for 1 hour. [157], a French regulatory review document for injectable almitrine, states “maximum recommended flow-rate: 15 mg/minute”, which corresponds to a flow rate of 242 μg/kg/min for a 62 kg human. In humans, gave a rapid intravenous (bolus) injection of 0.5 mg/kg, followed by infusing 2 mg/kg (corresponds to 16.7 μg/kg/min for a 62 kg human) for 2 hours, giving 2.5 mg/kg (corresponds to 155 mg for a 62 kg human) in just ˜2 hours. 200 mg (≙3.23 mg/kg for a 62 kg human) almitrine dimesylate orally per day has clinical precedent [259], as does an i.v. infusion rate of 16 μg/kg/min [156]. Combining these, one arrives at a daily i.v. infusion of 16 μg/kg/min for 202 minutes (3 hours and 22 minutes) to deliver 200 mg to a 62 kg human. Because, on average across subjects, only 85% of the oral dose is bioavailable, this oral dose can actually be approximated (in a 62 kg human) by a daily i.v. infusion of 16 μg/kg/min for 171 minutes (2 hours and 51 minutes). To illustrate, and not restrict, to deliver this same dose (to a 62 kg human) of almitrine dimesylate by continuous i.v., with an infusion rate of 8, 32, 64 μg/kg/min would take 5.7, 1.43 and 0.71 hours respectively. Optionally, infusion time can be shortened by injecting a proportion of the daily dose as i.v. bolus, optionally preceding the steady infusion. So, to illustrate, if 15 mg was administered by a preceding i.v. bolus (permissible by “maximum recommended flow-rate” instruction of [157]) then the duration required (in a 62 kg human) to replicate a 200 mg oral dose (factoring in bioavailability issue) would be 159 minutes of 16 μg/kg/min continuous i.v. infusion. In some disclosure embodiments, almitrine or a pharmaceutically-acceptable salt, solvate, hydrate or prodrug thereof is administered orally and by i.v. in combination to treat/ameliorate/prevent/combat cancer in a subject. So, to illustrate (not restrict), per day, 100 mg is administered orally and 100 mg is administered intravenously by 16 μg/kg/min for (in a 62 kg human) 101 minutes, 86 minutes if 15 mg of the i.v. dose is given by bolus. Optionally, the oral and i.v. administrations are timed so that as the i.v. administration finishes, and as plasma [almitrine] from the i.v. dose declines, almitrine from the oral dose enters the bloodstream to buoy/increase plasma [almitrine]. FIG. 3.3. in shows (data normalised to a 1 mg/kg dose) that the gradient of increase in plasma [almitrine] in the first 3 hours after an oral almitrine dose is similar to the gradient of decrease in plasma [almitrine] in the first 3 hours after an i.v. dose of almitrine terminates. So, administering oral almitrine as i.v. almitrine administration finishes can act to buoy/increase plasma [almitrine] for a longer period of time. This is very useful if the subject is to undergo radio- and/or chemo-therapy afterwards, wherein a high plasma [almitrine] is desired to gain the maximal additive/synergistic anti-cancer effect. All aforementioned dosages, routes/patterns of administration and infusion rates of almitrine or a pharmaceutically-acceptable salt, solvate, hydrate or prodrug thereof, in use for anti-cancer therapy/treatment in a subject, are componentry to the present disclosure. As are others, which are also contemplated by the scope of this disclosure. For example, the administered daily dosage could be greater than 200 mg. Indeed, relevantly, 400 mg oral almitrine dimesylate per day has been shown safe in healthy subjects, at least for the duration of that study [163]. Or the administered dosage could be less.

[0679] Intravenous infusion of 5.5 (±1.7) ug/kg/min almitrine dimesylate, in co-therapy with inhalation of nitric oxide (5 p.p.m.), increased arterial pO₂ by >30% across all subjects [183]. There are many similar papers in the literature, describing co-administration of almitrine and NO, which can be found readily by someone of the art. In some disclosure embodiments, almitrine or a pharmaceutically-acceptable salt, solvate, hydrate or prodrug thereof is administered, optionally intravenously, in co-therapy with nitric oxide (NO), optionally breathed, to treat/ameliorate/prevent/combat cancer in a subject, optionally in co-therapy with radio- and/or chemo-therapy, wherein the almitine and NO combination increases the subject's blood and tissue pO₂, which makes radio- and/or chemo-therapy more effective, adding to/synergising with the inherent anti-cancer activity of almitrine. At any point that almitrine administration is referred to in this disclosure, in further embodiments of this disclosure, NO is administered also.

[0680] Componentry to this disclosure is administering an i.v. bolus dose of almitrine or a pharmaceutically-acceptable salt, solvate, hydrate or prodrug thereof for anti-cancer therapy in a subject, optionally wherein the subject has lung cancer, and optionally wherein the almitrine concentration in the body is subsequently increased/prolonged by a subsequent period(s) of continuous i.v. infusion (optionally where the infusion rate equals/approximates the almitrine elimination rate) and/or one or more oral administrations of almitrine or a pharmaceutically-acceptable salt, solvate, hydrate or prodrug thereof (non-limiting e.g. tablet and/or solution). Optionally, wherein a foundational concentration of almitrine in subject plasma has been built up, prior to the i.v. dose of almitrine or a pharmaceutically-acceptable salt, solvate, hydrate or prodrug thereof, by one or more oral and/or i.v. doses of almitrine or a pharmaceutically-acceptable salt, solvate, hydrate or prodrug thereof, optionally administered on the same day and/or at some regular/irregular frequency, e.g. daily, in the day(s)/week(s)/month(s) before. Faster almitrine build up in the body can be achieved by dividing the daily dose up into multiple smaller doses, e.g. (non-limiting)₂₀₀ mg per day is administered by 100 mg administered twice per day, which means the build up period can be shorter.

[0681] At every point that radiotherapy is referred to in this disclosure, it encompasses all that a person of the art would expect it to. Including, without limitation, external (including, without limitation, one or more of external beam radiation therapy {e.g. using photons/electrons/hadrons/protons/neutrons/ions/nuclei etc.}, stereotactic body radiation therapy [SBRT], radiosurgery, 3-dimensional conformal radiation therapy, image-guided radiation therapy, intensity-modulated radiation therapy, tomotherapy, volumetric modulated arc therapy, particle therapy, proton therapy, neutron capture therapy, auger therapy) and/or internal (including, without limitation, one or more of brachytherapy, unsealed source radiotherapy, intraoperative radiotherapy, deep inspiration breath-hold, selective internal radiation therapy) radiotherapy. Moreover, when radiotherapy is referred to in this disclosure it encompasses radiotherapy with or without the co-administration of excess oxygen, wherein the subject breathes gas with a greater O₂ fraction than normal air at that altitude, optionally pure O₂, optionally the subject is administered hyperbaric O₂ therapy. An embodiment of this disclosure is to administer almitrine or a pharmaceutically acceptable salt, solvate, hydrate, prodrug thereof to a subject with cancer, optionally lung cancer, either orally and/or by i.v. (bolus and/or continuous) and/or by some other administration route, prior (on the same day and/or on prior day [s]) and/or during and/or after radiotherapy and/or chemotherapy. In some embodiments, almitrine or a pharmaceutically acceptable salt, solvate, hydrate, prodrug thereof is i.v. administered (bolus and/or continuous) before, during and after the subject undergoes radiotherapy and/or chemotherapy (optionally administered by i.v. also, bolus and/or continuous, in a separate or same infusion line to the subject), alternatively only before, or only during or only after, alternatively only before and after, alternatively only before and during, alternatively only during and after. In some embodiments, the administered almitrine enables a lower radiative/ionizing/chemotherapeutic(s) dose to be used to convey therapy. Optionally, it permits the same radiative dose to be used but over a longer timeframe, so the radiative intensity (per unit time) is less. Alternatively, the same radio- and/or chemo-therapy dose is used and greater therapeutic effect ensues. In a further embodiment, the subject has cancer and in more particular embodiments, the subject has lung cancer. In some disclosure embodiments a high ug/kg/min i.v. infusion rate, e.g. ≥8 μg/kg/min or ≥16 μg/kg/min or ≥64 μg/kg/min, of almitrine or a pharmaceutically acceptable salt, solvate, hydrate, prodrug thereof is delivered to a subject, optionally that has cancer, optionally lung cancer, prior and/or during and/or after radiotherapy and/or chemotherapy. A high infusion rate (by bolus only, or bolus+continuous, or continuous only) optimizes for all, or a significant proportion of, the daily almitrine dose, which in an embodiment is 200 mg but in other embodiments is higher or lower, being inside the subject at or around the time that radiotherapy and/or chemotherapy is administered, which gives the best opportunity for therapeutic synergy to occur. In some embodiments, i.v. (bolus and/or continuous) almitrine or a pharmaceutically acceptable salt, solvate, hydrate, prodrug thereof is administered preceding radio- and/or chemo-therapy and when this i.v. administration is stopped an oral dose of almitrine or a pharmaceutically acceptable salt, solvate, hydrate, prodrug thereof is administered so that the amount of almitrine entering the bloodstream from the oral dose partially/completely/exceeds the amount of i.v. dose almitrine eliminated from the body, which buoys the plasma almitrine concentration, which gives greater opportunity for anti-cancer therapeutic synergy between almitrine and radio- and/or chemo-therapy. In some embodiments, on days that the subject is administered radio- and/or chemo-therapy, all or some of the daily dose of almitrine or a pharmaceutically acceptable salt, solvate, hydrate, prodrug thereof is administered by i.v. (bolus and/or continuous), preferably near in time to the radio- and/or chemo-therapy, the nearer in time the better, most preferably coincident in time (for continuous i.v. infusion) or just before (for i.v. bolus only) or starting just before (for i.v. bolus followed my continuous i.v. infusion and/or oral administration), and, optionally, on days that the subject is not administered radio- and/or chemo-therapy, the daily dose of almitrine or a pharmaceutically acceptable salt, solvate, hydrate, prodrug thereof is absent or administered/taken orally, which the subject can do easily outside of a medical facility e.g. at home. So, for non-limiting example, during a daily course of radiotherapy and/or chemotherapy the subject receives almitrine or a pharmaceutically acceptable salt, solvate, hydrate, prodrug thereof by i.v. (bolus and/or continuous) and when this course of radiotherapy and/or chemotherapy pauses or finishes, and/or before it starts, the subject receives almitrine or a pharmaceutically acceptable salt, solvate, hydrate, prodrug thereof, optionally daily, orally, for a duration decided by a medical practitioner(s) and/or the subject.

[0682] For i.v. administering almitrine or a pharmaceutically acceptable salt, solvate, hydrate, prodrug thereof, and/or one or more chemotherapeutics (e.g. cisplatin, carboplatin etc.), during radiotherapy an uncharacteristically long i.v tube is preferable to keep the bulk of the i.v. equipment further away from the radiotherapy beam, most preferably wherein it is located behind some shielding. Optionally its radioactivity, or lack thereof, is regularly checked (e.g. using a Geiger counter and/or using some radioactivity sensor that stays on the equipment always {e.g. similar to that worn by workers that work in radioactive risk settings e.g. a dosimeter}), in an embodiment, before each use, and if too high, it is replaced with new equipment. In some embodiments, radioactive/electromagnetic/ionizing shielding is incorporated into the equipment itself. Preferably, the i.v. administration site(s) upon the subject shouldn't be directly under the radiotherapy beam and should be appropriately shielded as much as possible. In some embodiments, multiple i.v. lines are incident upon the subject undergoing radiotherapy, optionally wherein different chemotherapeutics are adminstered by the different lines, optionally wherein one or more i.v. lines administer almitrine or a pharmaceutically acceptable salt, solvate, hydrate, prodrug thereof.

[0683] In some embodiments, almitrine or a pharmaceutically acceptable salt, solvate, hydrate, prodrug thereof is i.v. administered (bolus and/or continuous), optionally in the same i.v, infusion, with one or more chemotherapies to a subject with cancer, optionally a lung cancer patient. In some embodiments, the timing of administering almitrine or a pharmaceutically acceptable salt, solvate, hydrate, prodrug thereof (e.g. oral or i.v. [bolus and/or continuous]), and the timing of administering one or more chemotherapies (e.g. oral or i.v. [bolus and/or continuous]), is coordinated so that peak plasma almitrine concentration occurs at the same time as the peak plasma concentration of chemotherapeutic(s), whereupon optionally, at this peak time, radiotherapy is administered.

[0684] In some embodiments, almitrine or a pharmaceutically acceptable salt, solvate, hydrate, prodrug thereof is orally administered before and/or during and/or after the subject, who in a further embodiment has cancer, optionally lung cancer, undergoes radiotherapy and/or chemotherapy; most preferably this oral almitrine is administrated before radiotherapy and/or chemotherapy and in further embodiments the timing of this oral almitrine administration vs. timing of radiotherapy and/or chemotherapy is co-ordinated so that the peak plasma concentration of almitrine occurs during or near in time to the radiotherapy and/or chemotherapy (N.B. in human, peak plasma concentration of almitrine occurs 3.5±0.7 hours after consuming almitrine dimesylate, absorption is improved by eating food [151]). In further embodiments, an oral course (e.g. daily, or other frequency) of almitrine administration, or a pharmaceutically acceptable salt, solvate, hydrate, prodrug thereof, is started days/weeks/months before a course of radiotherapy and/or chemotherapy starts, to build up a foundational level of almitrine inside the subject, and in further embodiments oral almitrine or a pharmaceutically acceptable salt, solvate, hydrate, prodrug thereof continues to be administered during the course of radiotherapy and/or chemotherapy and, in further embodiments, afterwards also. Before radio- and/or chemo-therapy, the number of days and the timing/frequency/dose of almitrine administered, or a pharmaceutically acceptable salt, solvate, hydrate, prodrug thereof, is optimized so that the plasma concentration of almitrine in the subject is suitably high (in some embodiments, to illustrate and not restrict, >300 ng/ml and/or >200 ng/ml) before radio- and/or chemo-therapy starts, wherein in a further embodiment the plasma concentration of almitrine in the subject is recorded to make sure. If not, the same or increased dose of almitrine or a pharmaceutically acceptable salt, solvate, hydrate, prodrug thereof is administered/taken to/by the subject, optionally more frequently, for a further time period before radio- and/or chemo-therapy commences.

[0685] In some disclosure embodiments, a therapeutically effective amount of almitrine or a pharmaceutically acceptable salt, solvate, hydrate, prodrug thereof, and/or an almitrine containing pharmaceutical composition, is administered to treat/ameliorate/prevent/combat cancer in a subject, optionally lung cancer, optionally Non-Small Cell Lung Cancer (NSCLC), optionally lung adenocarcinoma, optionally a PET positive cancer, optionally in co-therapy with radiotherapy, optionally wherein almitrine makes the cancer more radiosensitive/less radioresistant and/or the anti-cancer activities of almitrine and radiotherapy add/synergize, optionally in co-therapy with one or more chemotherapies, optionally wherein almitrine makes the cancer more chemosensitive/less chemoresistant and/or the anti-cancer activities of almitrine and chemotherap[y/ies] add/synergize, optionally in co-therapy with (without limitation) one or more of cisplatin, carboplatin, etoposide, gemcitabine, vincristine, vinblastine, paclitaxel, albumin-bound paclitaxel, vinorelbine, topotecan, irinotecan, temozolomide, docetaxel, pemetrexed, erlotinib, brigatinib, gefitinib, lorlatinib, afatinib, alectinib, denosumab, ipilimumab, pembrolizumab (Keytruda), nivolumab (Opdivo), atezolizumab (Tecentriq), durvalumab, dacomitinib, osimertinib, tivantinib, onartuzumab, sorafenib, crizotinib, ceritinib, trametinib, dabrafenib, bevacizumab (avastin), exisulind, bexarotene, cetuximab, squalamine, necitumumab, cyclophosphamide, ramucirumab, doxorubicin, porfimer, methotrexate, an FDA and/or EMA approved drug(s) or treatment(s) for lung cancer (including, without limitation, radiofrequency ablation, microwave ablation, cryoablation, thermal ablation, chemoembolization), optionally with plasma [almitrine] and/or [lactate] and/or [bilirubin] recording(s) before and/or during the course of almitrine administration, wherein if these are abnormally/too high, almitrine administration is reduced/stopped/not commenced. Almitrine greatly assists the treatment/amelioration/prevention/combat of NSCLC, which can be very radio (e.g. refer radioresistance of NCI-H460 cell line in [184]) and chemo-resistant, wherein almitrine undermines this resistance, enabling greater radio- and chemo-therapy to occur, improving the clinical outcome of the subject and/or their quality of life. It especially, without limitation, helps subjects with NSCLC that can't/won't undergo surgery, or whose cancer is inoperable, and who must completely rely on radio- and/or chemo-therapy for cancer treatment, wherein some NSCLC cancers are very radio- [184] and chemo-resistant and thence incredibly dangerous.

[0686] In some disclosure embodiments, (preferably a therapeutically effective amount of) almitrine or a pharmaceutically acceptable salt, solvate, hydrate, prodrug thereof, and/or an almitrine containing pharmaceutical composition, is administered to a subject topically/locally rather than systemically, optionally to a cancer(s) or close to a cancer(s) or to a blood vessel perfusing a cancer(s), wherein this cancer can be a tumour. In a particular embodiment, the cancer is suspected rather than diagnosed. In an embodiment, it is applied topically to the skin, optionally to a skin cancer(s) or suspected/possible skin cancer(s).

[0687] A disclosure embodiment is a pharmaceutical composition comprising a therapeutically effective amount of almitrine and a fatty acid(s), wherein the scope of what is a fatty acid is well known to those of the art. For non-limiting example, wherein almitrine and a fatty acid are in a 1:2 ratio. Other stoichiometries/ratios are also componentry to the present disclosure. For example, a 1:1 almitrine to fatty acid ratio. Some fatty acid(s) can exert anti-cancer activity (illustrative literature: [185-186]) and in preferred embodiments almitrine is combined in a composition(s) with a fatty acid(s) that exerts anti-cancer activity, and in more preferred embodiments the anti-cancer activity of almitrine and fatty acid(s) synergize. The greater the anti-cancer activity of the fatty acid(s) the more preferred the embodiment of its formulation with almitrine. In a further embodiment, an almitrine and fatty acid(s) containing composition(s) is used in a method of treatment of the human or animal body by therapy, for (non-limiting) example to treat/ameliorate/prevent/combat cancer in a subject. In another embodiment, an almitrine and fatty acid(s) containing composition is used for the manufacture of a medicament for the treatment/amelioration/prevention/combat of cancer. A disclosure embodiment is almitrine in a 1:2 stoichiometry with 9Z,11E conjugated linoleic acid (Rumenic Acid), which is an example of a fatty acid with anti-cancer activity [186]. In other illustrative example embodiments almitrine is in a 1:2 stoichiometry with Eicosapentaenoic Acid, or Docosahexaenoic Acid, or Erucic acid. Example embodiment:

[chemical structure]

### EXAMPLE (VII)

### Formula (VII):

[0688] Compounds of Formula (VII) include any proteinaceous compound/amino acid sequence/peptide/protein/polypeptide/antibody that preferentially/disproportionally/selectively inhibits the “reverse”, ATP hydrolysing, mode as compared to the “forward”, ATP synthesising, mode of ATP synthase;

[0689] A polynucleotide that codes for at least one peptide/protein sequence of Formula (VII) is also a compound of Formula (VII);

[0690] A vector/gene therapy comprising at least one polynucleotide that codes for at least one peptide/protein sequence of Formula (VII) is also a compound of Formula (VII).

[0691] Note that selectively inhibiting F₁F₀ ATP hydrolysis can seemingly inhibit F₁F₀ ATP synthesis because less ATP is made, but this is because less ATP is hydrolysed and so less ATP needs to be made, rather than any actual direct inhibition upon F₁F₀ ATP synthesis. Preferred embodiments are those that inhibit the reverse mode of ATP synthase potently, and the forward mode of ATP synthase less potently, and most preferably not at all. If F₁F₀ ATP synthesis falls because of inhibited F₁F₀ ATP hydrolysis, and not primarily because of direct inhibition of F₁F₀ ATP synthesis, then this compound is still within the scope of this disclosure.

[0692] Componentry to Formula (VII) is melittin, the pre-sequence of yeast cytochrome oxidase subunit IV and each synthetic derivative of this pre-sequence ([4], incorporated in its entirety). Also componentry to Formula (VII) is one or more IF1 proteins, which are afforded their own Formula below: Formula (VIII). These examples just given for Formula (VII), and further examples herein, are illustrative and not restrictive.

[0693] Componentry to this disclosure is:
[0694] a pharmaceutical/cosmetic composition/medicament comprising (or consisting of) at least one compound of Formula (VII) and/or a pharmaceutically/cosmetically acceptable salt, solvate, hydrate, prodrug, liposome, nanoparticle (e.g. lipid nanoparticle, LNP) or other vector of the art thereof;
[0695] at least one polynucleotide of Formula (VII) in at least one vector/gene therapy of the art [and/or a cell(s)/transgenic organism(s) thereof] and a pharmaceutical/cosmetic composition/medicament thereof.

### EXAMPLE (VIII)

### Formula (VIII):

[0696] Compounds of Formula (VIII) include (from any organism, preferably a eukaryote) any IF1 protein, and any (preferably functional) sequence variant thereof, and any (preferably functional) amino acid sub-sequence/fragment of an IF1 protein, and any (preferably functional) sequence variant thereof, and any fusion protein thereof, wherein “functional” in this sentence refers to an ability to inhibit/reduce F₁F₀ ATP hydrolysis (e.g. inside a cell, preferably a eukaryote cell, and/or in a Sub-Mitochondrial Particle [SMP] assay of F₁F₀ ATP hydrolysis [functional in such an SMP assay with endogenous/native IF1 protein removed and/or present]);
[0697] Compounds of Formula (VIII) include the peptides/proteins of the teaching of this disclosure (e.g. sequences within this disclosure), for example those comprising (or consisting of) a sequence found within its Sequence Listing, for example SEQ ID NO:X, wherein X can be 1, or the number of sequences in the Sequence Listing component to this application, or any integer between 1 and the total number of sequences in the Sequence Listing component to this application;
   [0698] wherein “functional” (as defined above) sequence variant of SEQ ID NO:X, concatenated sequences of SEQ ID NO:X (or “functional” sequence variant thereof), fragment of SEQ ID NO:X (or “functional” sequence variant thereof), concatenated fragments of one or more of SEQ ID NO:X (or “functional” sequence variant thereof) are also included;
[0699] A polynucleotide that codes for at least one peptide/protein sequence of Formula (VIII) is also a compound of Formula (VIII);
[0700] A vector/gene therapy of the art comprising at least one polynucleotide that codes for at least one peptide/protein sequence of Formula (VIII) is also a compound of Formula (VIII).

[0701] A pharmaceutical/cosmetic composition/medicament comprising (or consisting of) at least one compound of Formula (VIII) and/or a pharmaceutically/cosmetically acceptable salt, solvate, hydrate, prodrug, liposome, nanoparticle (e.g. lipid nanoparticle, LNP) or other vector of the art thereof;
[0702] at least one polynucleotide of Formula (VIII) in at least one vector/gene therapy of the art [and/or a cell(s)/transgenic organism(s) thereof] and a pharmaceutical/cosmetic composition/medicament thereof.

[0703] Larger species tend to have more IF1 protein per unit mass, and/or use an IF1 protein that has greater inhibitory potency for F₁F₀ ATP hydrolysis, a lower specific metabolic rate, less metabolic heat production per unit mass, and longer lifespan (FIG. 4). Increasing the amount of at least one IF1 protein, and/or expressing at least one IF1 protein/fragment (or sequence variant thereof) that has (preferably greater) inhibitory potency for F₁F₀ ATP hydrolysis at pH 8, decreases metabolic rate and extends lifespan, so long as exogenous heat substitutes for the lesser endogenous heat production, or greater body insulation (e.g. wearing more clothes) renders same body temperature for a lessor metabolic rate. Componentry to this disclosure is extending the lifespan and/or healthspan of a subject, for example a mouse or human, by increasing the amount of the subject's own IF1 protein sequence and/or by introducing one or more exogenous IF1 protein sequences (and/or sequence variant(s) thereof, and/or fragment and/or concatenated fragments thereof [and/or sequence variant(s) thereof]), optionally by introducing at least one polynucleotide sequence(s) that codes for at least one IF1 protein/fragment (or sequence variant thereof), from a larger and/or longer living (greater maximal lifespan) species. The naked mole rat (Heterocephalus glaber) expresses ATPIF1 five times more than the mouse [187], and lives ten times longer. An embodiment is to express the IF1 gene (National Center for Biotechnology Information [NCBI] Gene ID: 101712500), and/or its further IF1 like gene (NCBI Gene ID: 110349814), of the naked mole rat in a homeothermic species (e.g. mouse/rat) to slow its metabolism and extend its lifespan, with the caveat that this species will then acquire some/all of the thermoconformer character of the naked mole rat and so must be kept at a higher ambient temperature. Naked mole rats are thermoconformers, which can survive without homeothermy because they live in hot East African countries, permanently underground in burrows (wherein heat is maintained at night), even eating underground (tubers), and can behaviourally thermoregulate by choosing their depth in the burrow.

[0704] IF1 proteins are highly conserved and typically interchangeable between species [141]. An embodiment is to increase the amount of IF1 protein in one or more cells of a subject and/or to administer/express in the subject at least one IF1 protein(s) from a different species (preferably a larger species and/or species with greater maximal lifespan) and/or at least one IF1 protein fragment and/or at least one IF1 protein/fragment sequence variant, most preferably which has greater inhibitory action against F₁F₀ ATP hydrolysis at normal matrix pH [˜8] (e.g. bovine/human IF1 protein with a H49K substitution (“mature” {Mitochondrial Import Sequence [MIS] cleaved off} IF1 protein numbering) [141, 138]). Wherein methods of introducing one or more of one or more genes and/or gene copies and/or DNA and/or RNA and/or one or more proteins into a subject are well known to those of the art e.g. refer [130], which expresses in mice the human IF1 protein (with H49K substitution, which increases its inhibition of F₁F₀ ATP hydrolysis at normal matrix pH [˜8]). An embodiment is expression in a subject of a bovine IF1 protein variant, which has one or more of its histidine residues at positions His-48, 49, 55 independently changed to a different amino acid, optionally alanine or lysine. In different embodiments, IF1 protein variant from a non-bovine species is expressed in a subject, wherein this IF1 protein is changed at one or more of the equivalent histidine positions to those aforementioned for the bovine IF1 protein sequence (these histidines are highly conserved across species, FIG. 10), which renders the IF1 protein with greater inhibitory potency against F₁F₀ ATP hydrolysis at normal matrix pH [˜8] [141, 138].

[0705] The use of one or more IF1 proteins, or a precursor thereof (e.g. with Mitochondrial Import Sequence (MIS) bound), which has its “phosphorylation control switch” amino acid residue and/or one or more of its “pH dependence motif” amino acid residues (FIG. 10) independently changed to be a different amino acid than found in the native IF1 protein(s), (and/or at least one polynucleotide that codes for one or more of the aforementioned, optionally with at least one gene expression control element(s), optionally a vector(s) thereof) in/for the manufacture of a medicament and/or pharmaceutical/cosmetic composition. Wherein to illustrate, using human “mature” (after Mitochondrial Import Sequence (MIS) cleaved) IF1 protein numbering (but not restricting to human IF1 protein): the “phosphorylation control switch” amino acid residue is S14 and the pH dependence motif amino acid residues are E26, H48, H49, H55, H56. To illustrate (not restrict), S14 is substituted with a different amino acid, which cannot be phosphorylated, illustratively alanine, and one/or one or more of E26, H48, H49, H55, H56 are independently substituted with another amino acid, illustratively (but not restrictively) selected from alanine, lysine, arginine. Especially preferred is S14A and H49K (or H49A or H49R), optionally modifying at one or more of the 4 other positions (e.g. substituting to alanine) also.

[0706] Contemplated by this disclosure, without limitation, is an organism IF1 protein, plant IF1 protein, animal IF1 protein, mammalian IF1 protein, mouse IF1 protein, rat IF1 protein, rodent IF1 protein, naked mole-rat IF1 protein, rabbit IF1 protein, guinea pig IF1 protein, bovine IF1 protein, canine IF1 protein, feline IF1 protein, pet/companion animal IF1 protein, livestock IF1 protein, equine IF1 protein, non-human primate IF1 protein and human IF1 protein.

[0707] All IF1 protein/fragment sequences, and sequence variants thereof, are componentry to this disclosure, as are the nucleotide sequences that code for them, and use thereof (for at least one use disclosed herein).

### Some IF1 Protein Fragment Embodiments

[0708] In IF1 protein depleted Sub-Mitochondrial Particles (SMPs) from Bos taurus, at pH 6.7 and 37° C., introduced Bos taurus IF1 protein (recombinantly produced in E. Coli) has an IC₅₀ of 0.034 μM [142]. In this same assay and study, Bos taurus IF1 protein fragments (using “mature” [without Mitochondrial Import Sequence, MIS] IF1 protein numbering) 14-84 and 10-47 have an IC₅₀ of 0.018 and 0.045 μM respectively, from which the authors of that study triangulate a “minimal inhibitory sequence” of residues 14-47. However, these fragments have the problem that their F₁F₀ ATPase inhibition dissipated over the 5 minute testing time: “ATPase activity deviates from linearity and increases with time”. The following IF1 protein fragments are longer, but are not reported to have this problem (IC₅₀ in μM in brackets): 10-84 (0.035), 1-56 (0.032), 1-60 (0.019), wherein the latter has a lower IC₅₀ than complete IF1 (showing that IF1 protein residues 61-84 are not essential for inhibitory activity at pH 6.7). Combining the teaching of these fragments, I disclose the following novel fragments, which have the benefit of being shorter (e.g. better for passaging across a biological membrane [s]): 10-56, 10-60. In [145], in a reportedly directly comparable assay to that used in (and indeed, they both report a similar IC₅₀ value for complete IF1 protein), IF1 protein fragment 42-58 has an IC₅₀ of 0.009 μM, which doesn't have the aforementioned problem of its inhibition decreasing in time. Fragments 14-47 and 42-58 have overlap with residues 42-47 (LAALKK [residues 29-34 of SEQ ID NO:661]), wherein this as a separate fragment, or as the IF1 protein fragment to use in a fusion protein of this disclosure (e.g. that comprises one or more of a Mitochondrial Import Sequence [MIS], Cell Penetrating Peptide [CPP], epitope/affinity tag sequence), optionally with one or more lipidic/lipid moieties (e.g. at least one fatty acid e.g. of between 2 and 25 carbon atoms) covalently bound, optionally incorporated into one cycle of a bicyclic structure, is an embodiment (optionally incorporated into a cosmetic/dermopharmaceutical). Presumably this core sequence is helped by an ancillary sequence for binding to ATP synthase, which can be on its C-terminal side (as in 42-58) or its N-terminal side, in which case a longer sequence is required (as in 14-47). As 42-58 can inhibit (0.009 μM) F₁F₀ ATP hydrolysis in [145], there is a mystery why 23-84, which contains 42-58, cannot (IC₅₀>100 μM) inhibit in [142]. Revealingly, 14-84 can inhibit (0.018 μM). So, it might be that residues 14-22 are required for the binding pathway, in order for key inhibitory resides to get to their correct place upon ATP synthase. But that 42-58 fragment is smaller and more nimble and binds by a different pathway, which doesn't require these N-terminal residues. Combining teaching of 42-58 (0.009 μM) and 1-56 (0.032 μM), I disclose 1-58 IF1 protein fragment, and with the teaching of 10-84 (0.035 μM), I disclose novel 10-58 IF1 protein fragment. Combining teaching of 42-58 (0.009 μM) and 1-56 (0.032 μM), I disclose novel 42-56 IF1 protein fragment. Herein, 14-47 is cited/used often as an exemplary IF1 protein fragment. Herein, at every point that a 14-47 IF1 protein fragment is referred to/shown, in alternative embodiments, a different IF1 protein fragment (optionally from same species/group of species as the context, or a different species/group of species as the context, or any species) is substituted in its place, for non-limiting example, selected from the group comprising: 42-58, 1-56, 1-60, 10-56, 10-60, 1-58, 10-58, 10-84 (or 42-56 or 42-47). In the case that a desired result isn't obtained with a 14-47 IF1 protein fragment, as this is probably a function of its (aforementioned) inhibitory effect decreasing in time, an alternative IF1 protein fragment, without this problem (as aforementioned, e.g. one of 42-58, 1-56, 1-60, 10-56, 10-60), should be utilized instead. But making due consideration that, although IF1 protein fragment 42-58 can potently inhibit bovine F₁F₀ ATP hydrolysis, this is not so much the case for rat ATP synthase (and so very possibly not mouse ATP synthase either). IF1 protein fragment 1-60 is a good, first option should 14-47 underperform in the system used. When an IF1 protein fragment (or sequence variant thereof) is referred to herein, in a different embodiment, a different IF1 protein fragment (or sequence variant thereof) is contemplated in its place, and across different embodiments, all possible IF1 protein fragments (or sequence variants thereof) are contemplated in its place. Contemplated IF1 protein fragments can differ for example in their length, wherein all possible lengths are contemplated: e.g. in different embodiments: shorter than (using “mature” [without MIS] IF1 protein numbering) z amino acids long, wherein z is an integer selected from 85, 84, 83, 82, 81, 80, 79, 78, 77, 76, 75, 74, 73, 72, 71, 70, 69, 68, 67, 66, 65, 64, 63, 62, 61, 60, 59, 58, 57, 56, 55, 54, 53, 52, 51, 50, 49, 48, 47, 46, 45, 44, 43, 42, 41, 40, 39, 38, 37, 36, 35, 34, 33, 32, 31, 30, 29, 28, 27, 26, 25, 24, 23, 22, 21, 20, 19, 18, 17, 16, 15, 14, 13, 12, 11, 10, 9, 8, 7, 6, 5, 4, 3, 2 (different values of z are different embodiments). Some contemplated IF1 protein fragments include (using “mature” [without MIS] IF1 protein numbering) x-y, where x is an integer between 1 and 20 (or between 1 and 44, or between 1 and 84), and y is an integer between 40 and 85 (or between 50 and 85, or between 60 and 85, or between 2 and 85) [different values of x and/or y are different embodiments; within their aforementioned range constraints, all possible combinations of x and y integer values are contemplated]. Some contemplated IF1 protein fragments include 1-84, 2-84, 3-84, 4-84, 5-84, 6-84, 7-84, 8-84, 9-84, 10-84, 11-84, 12-84, 13-84, 14-84, 15-84, 16-84, 17-84, 18-84, 19-84, 20-84, 21-84, 22-84, 23-84, 24-84, 25-84, 26-84, 27-84, 28-84, 29-84, 30-84, 31-84, 32-84, 33-84, 34-84, 35-84, 36-84, 37-84, 38-84, 39-84, 40-84, 41-84, 42-84, 43-84, 44-84, 45-84, 46-84, 47-84, 48-84, 49-84, 50-84, 51-84, 52-84, 53-84, 54-84, 55-84, 56-84, 57-84, 58-84, 59-84, 60-84, 61-84, 62-84, 63-84, 64-84, 65-84, 66-84, 67-84, 68-84, 69-84, 70-84, 71-84, 72-84, 73-84, 74-84, 75-84, 76-84, 77-84, 78-84, 79-84, 80-84, 81-84, 82-84, 83-84, and, for each aforementioned fragment, all possible sub-sequences/fragments thereof are also contemplated. Some non-limiting example IF1 protein fragments [wherein peptides/proteins comprising (or consisting of) one or more of these are contemplated] include 14-47, 13-47, 12-47, 11-47, 10-47, 9-47, 8-47, 7-47, 6-47, 5-47, 4-47, 3-47, 2-47, 1-47, 14-48, 14-46, 14-45, 14-44, 14-43, 14-42, 13-48, 13-46, 13-45, 13-44, 13-43, 13-42, 12-48, 12-46, 12-45, 12-44, 12-43, 12-42, 11-48, 11-46, 11-45, 11-44, 11-43, 11-42, 10-48, 10-46, 10-45, 10-44, 10-43, 10-42, 42-58, 42-59, 1-56, 1-57, 1-58, 1-59, 1-60, 10-56, 10-57, 10-58, 10-59, 10-60, 10-84, 14-84, 14-60, 18-84, 10-50, 1-45, 42-56, 42-47, 48-56, 49-55.

### Some Novel IF1 Protein Fragment Embodiments

[0709] Using “mature” [without Mitochondrial Import Sequence, MIS] IF₁ protein numbering, with IC50 values (μM) in brackets, IF1 protein fragments 10-47 (0.045) or 1-60 (0.019) can inhibit F₁F₀ ATP hydrolysis in IF1 protein depleted bovine SMPs at pH 6.7, wherein the 1-60 fragment actually has a lower IC₅₀ than complete IF1 protein (0.034) [142]. So, residues more C-terminal than the 60^{th} residue aren't required to inhibit F₁F₀ ATP hydrolysis. And very arguably those more C-terminal to the 47^{th} residue. IF1 protein fragments 10-47 and 1-60 exist as monomers. The IF1 protein C-terminal region is involved in dimerization, tetramerization and higher oligomerization. IF1 protein monomers and dimers can inhibit F₁F₀ ATP hydrolysis, but dimer of dimers (tetramer) cannot because some or all the N-terminal inhibitory region (e.g. 14-47) is occluded in the dimer-dimer contacts. And nor can higher order oligomers. IF1 protein oligomerization state is pH dependent, wherein the C-terminal region confers this pH dependence (refer “pH dependence motif” in FIG. 10), tending to exist as active dimers at acidic pH and inactive tetramers (and higher oligomers) at alkaline pH (e.g. pH 8, the normal pH of mitochondrial matrix). By the teaching of this disclosure, this enables the therapeutic utility of a C-terminal IF1 protein fragment, which is short enough that it binds the C-terminal region of a complete IF1 protein without occluding its N-terminal inhibitory region, which blocks IF1 protein tetramerization/sequesteration/inactivation at alkaline pH, increasing the amount of active IF1 protein monomers/dimers at alkaline pH (e.g. pH 8, the normal pH of mitochondrial matrix). In some embodiments, this C-terminal fragment is from within the residue range (using “mature” [without MIS] IF1 protein numbering): residues: 61-85. In alternative embodiments, this C-terminal fragment is from within the residue range (using “mature” [without Mitochondrial Import Sequence, MIS] IF1 protein numbering): residues: 48-85, optionally comprising the H49 and/or H55 residues (importance of H49 and H55 to tetramerization has been experimentally shown), optionally comprising (or consisting of) part(s) or all of the HXXXXXH motif (within “pH dependence motif”, FIG. 10, residues 36-42 of SEQ ID NO:676), wherein X can be any amino acid coded for by the genetic code, optionally being, in different embodiments, shorter than c amino acids long, wherein c is an integer selected from 45, 44, 43, 42, 41, 40, 39, 38, 37, 36, 35, 34, 33, 32, 31, 30, 29, 28, 27, 26, 25, 24, 23, 22, 21, 20, 19, 18, 17, 16, 15, 14, 13, 12, 11, 10, 9, 8, 7, 6, 5, 4, 3, 2 [different values of c are different embodiments], optionally being an IF1 protein fragment less than 20 amino acids long which comprises IF1 protein residues {using “mature” [without MIS] IF1 protein numbering}: 49-55, optionally comprising/consisting of residues: 48-56 and 1 to 10 (more preferably 1 to 5, optionally 1 to 3) surrounding (on either side) residues. Bovine IF1 protein fragment 44-84 exists as a dimer [189], and cannot form tetramers. Even at pH 8 [190]. Which suggests that there is at least one residue required for tetramerization more N-terminal than the 44^{th} residue. Indeed, triangulated to be in the region 32-44, because bovine IF1 protein fragment 32-84 can form tetramers [190]. But the aforementioned C-terminal occlusion strategy of this disclosure still works. Because, to block tetramerization, one has not got to occlude all the residues required for tetramerization, only a fraction of them. Most of which are in the C-terminal region of the IF1 protein (bovine IF1 protein fragment 1-60 doesn't form dimers, tetramers or higher oligomers [191, 143]). So, to repeat the approach: herein disclosed is an IF1 protein fragment (disproportionally/completely from the C-terminal region/half) that doesn't have the ability to inhibit F₁F₀ ATP hydrolysis directly itself. But that binds a C-terminal region of a complete IF1 protein, occluding its tetramerization domain, preventing its inactivation by tetramerization (and higher oligomerization) at alkaline pH, but not occluding its more N-terminal F₁F₀ ATP hydrolysis inhibiting domain, which increases the inhibition of F₁F₀ ATP hydrolysis at the normal/alkaline pH of mitochondrial matrix (pH 8). Advantageously, some examples of such an IF1 protein fragment can be shorter (better for intracellular delivery) than an IF1 protein/fragment that can inhibit F₁F₀ ATP hydrolysis directly itself. This approach relies upon complete IF1 protein being present. So these IF1 protein fragments will be observed to reduce F₁F₀ ATP hydrolysis, at pH 8, in an SMP assay of F₁F₀ ATP hydrolysis, when IF1 protein is present, and not (or very little) when IF1 protein amount is depleted beforehand. Preferred is to use SMPs sourced from big animal species, which tend to have more IF1 protein (e.g. bovine SMPs are favoured over those of rat), especially those reared in warm temperatures (tends to increase IF1 protein amount [117]).

### Different Mechanism of Action (MOA) and Consequently Different Species Preference

[0710] The species preference is different for different IF1 protein fragments. By the teaching of this disclosure, longer-living species tend to have more, and/or a more potent, IF1 protein (FIG. 4). To abstract somewhat, one can say that the N-terminal domain of an IF1 protein is for inhibiting F₁F₀ ATP hydrolysis, and its C-terminal domain is more for conferring its inactivation, via its tetramerization (and higher oligomerization), at the normally alkaline pH of the mitochondrial matrix (pH 8). To generalize further, the N-terminal domain of an IF1 protein from a longer-living species binds its ATP synthase more tightly/potently, and its C-terminal domain binds its other IF1 proteins {to form IF1 protein tetramers and higher oligomers} less tightly. The N-terminal domain of an IF1 protein from a shorter-living species binds its ATP synthase less tightly/potently and its C-terminal domain binds its other IF1 proteins {to form IF1 protein tetramers and higher oligomers} more tightly. So, a disproportionally N-terminal IF1 protein fragment (with most/all of its sequence residing in the N-terminal half of IF1 protein), which directly binds ATP synthase, and directly inhibits F₁F₀ ATP hydrolysis (e.g. the 14-47 fragment), is best sourced from a longer-living species (e.g. human, or blue or bowhead whale). But, because shorter-living species have more tightly bound IF1 tetramers {and higher oligomers}, a disproportionally C-terminal IF1 protein fragment (with most/all of its sequence residing in the C-terminal half of IF1 protein), which acts by binding another IF1 protein, is better sourced from a shorter-than a longer-living species. With the caveat that the IF1 protein of a species is tuned to its own ATP synthase. So, for example, although the N-terminal domain of an IF1 protein from a longer-living species binds its ATP synthase more tightly/potently, this doesn't necessarily mean, in all cases, that it can bind the ATP synthase of a shorter-living species more tightly/potently than the shorter-living species' own IF1 protein. Because of the evolutionary distance between the species. Wherein greater distance tends to decrease the opportunity for advantageous interoperability. Optionally an administered IF1 protein fragment is from a species not too far evolutionarily removed from a/each species to be administered. Optionally the disproportionally N-terminal or C-terminal IF1 protein fragment can be from the same species as that to be administered. Optionally the disproportionally C-terminal IF1 protein fragment can be from a short-living mammal, e.g. rodent, e.g. mouse.

[0711] The administration to a subject of a complete (or nearly complete) IF1 protein (optionally from a long-lived species e.g. human, or blue or bowhead whale), and a fragment from the C-terminal region of an IF1 protein (optionally from a shorter-lived species e.g. mouse), is contemplated, wherein this dual administration can confer an additive/synergistic effect.

### Summary of Two Different Mechanisms of Action

[0712] Without seeking restriction by theory, some IF1 protein fragments of this disclosure inhibit/reduce F₁F₀ ATP hydrolysis directly, by acting upon ATP synthase itself, and others bind the pH sensing region of complete endogenous IF1 protein and disrupt higher (≥tetramer) IF1 protein oligomerization, liberating IF1 protein dimers/monomers to inhibit/reduce F₁F₀ ATP hydrolysis. So, either directly or indirectly they reduce F₁F₀ ATP hydrolysis. One can discriminate between these two Mechanisms of Action (MOAs) by independently testing IF1 protein fragment in an SMP assay of F₁F₀ ATP hydrolysis, with and without endogenous/native IF1 protein removed (can remove IF1 protein, for example, via method of Horstman LL, Racker E 1970 J. Biol. Chem. 245, 1336-1344), wherein if it acts directly on ATP synthase it will inhibit in both cases, and if via IF1 protein, it will only inhibit in the first and not the second case.

### Some Preferred IF1 Proteins/Fragments (or Sequence Variants Thereof)

[0713] An IF1 protein fragment that still has enough residues that it can still inhibit F₁F₀ ATP hydrolysis, but which is without the IF1 protein's C-terminal pH dependent tetramerization (and higher oligomerization) domain (or at least not enough of it for it to be functional i.e. at least not enough of it that it can confer tetramer and higher oligomerization) has the advantage that it is constitutively active, i.e. it can constitutively inhibit F₁F₀ ATP hydrolysis, even at alkaline pH (e.g. at pH 8, which is the typical pH of mitochondrial matrix). Some IF1 protein fragments that fulfil this criteria include, but are not restricted to, residues (“mature” [without MIS] IF1 protein numbering): 1-60, 10-60, 14-60, 1-57, 10-57, 14-57, 10-47 and 14-47. An alternative to this C-terminal truncation is just to modify key residues within this C-terminal domain such that it can no longer confer pH dependent tetramerization (and higher oligomerization), e.g. refer to “pH dependence motif”, and modifications thereof (e.g. H49K or H49R substitution), in FIG. 10, to confer constitutive inhibition of F₁F₀ ATP hydrolysis, even at alkaline pH. An IF1 protein/fragment, or sequence variant thereof, that cannot (or doesn't have strong disposition to) form tetramers, and higher oligomers, which exists simply/disproportionally as IF1 protein/fragment (or sequence variant thereof) monomers and/or dimers, even at alkaline pH (e.g. pH 8), but which can still inhibit F₁F₀ ATP hydrolysis, is a preferred IF1 protein fragment. Even more preferred is such an IF1 protein/fragment (or sequence variant thereof) with its “phosphorylation control switch” residue [FIG. 10] being an amino acid that cannot be phosphorylated, optionally alanine.

### Further Preferred

[0714] Peptide/protein (optionally with one or more of its carboxyl groups esterified) comprising (or consisting of) [preferably wherein the following is in N to C-terminal order] at least one Cell Penetrating Peptide sequence (CPP, e.g. a poly-arginine CPP, optionally with a fatty acid [e.g. of between 2 to 25 carbons] acylated to its N-terminal end) conjoined with (e.g. peptide bonded to) at least one Mitochondrial Import Sequence (MIS; conferring mitochondrial matrix localization, optionally/preferably wherein the MIS is that used by the species administered to for its native IF1 protein; e.g. MIS that human uses for its native IF1 protein) conjoined with (e.g. peptide bonded to) at least one “mature” (without MIS) IF1 protein/fragment (or sequence variant thereof) that is optionally/preferably:
[0715] (a) an IF1 protein sufficiently truncated at its C-terminal end (non-limiting e.g. truncated up to {using “mature” [without MIS] IF1 protein numbering} its 60^{th} or 47^{th} residue), and/or optionally truncated at its N-terminal end (non-limiting e.g. by any number of residues up to 9 [or 13] residues), and/or with one or more amino acid substitutions in its “phosphorylation control switch” and/or “pH dependence motif” (FIG. 10; non-limiting e.g. one or more of {using “mature” [without MIS] IF1 protein numbering} S14A [or T14A], E26A [or Q26A or E26Q], H48A [or Y48A], H49K [or H49A or H49R], H55A [or Y55A or V55A], H56A [or T56A or S56A] substitutions), such that it can still inhibit F₁F₀ ATP hydrolysis but it cannot (or cannot as readily) form IF1 protein tetramers (and higher oligomers) at alkaline pH, preferably such that it can more potently inhibit F₁F₀ ATP hydrolysis at the normal, alkaline pH (˜pH 8) of the mitochondrial matrix (than native/unmodified IF1 protein), optionally/preferably wherein this IF1 protein/fragment (or sequence variant thereof) has a sequence derived/modified from the IF1 protein sequence of the species to be administered to [e.g. human] or a species with a longer maximal lifespan, optionally a species with a very long maximal lifespan such as a whale e.g. bowhead or blue whale; or
[0716] (b) an IF1 protein fragment comprising residues from the C-terminal half of an IF1 protein, which can bind to a complete IF1 protein, therein inhibiting or preventing (reducing the propensity for) complete IF1 proteins (e.g. monomers or dimers thereof) combining to form tetramers (or higher oligomers) thereof, but wherein its binding doesn't block complete IF1 protein monomers/dimers from inhibiting F₁F₀ ATP hydrolysis, preferably wherein it actually increases their inhibition of F₁F₀ ATP hydrolysis at the normal, alkaline pH of the mitochondrial matrix;
[0717] and use thereof (for at least one use disclosed herein, e.g. for treating cancer and/or slowing aging in a subject, e.g. as at least one component of a cosmetic), optionally wherein one or more amino acid sequences from both these general forms are co-administered to a subject, optionally/preferably wherein the fusion protein has an N- to C-terminal order: [CPP]-[MIS]-[IF1 protein/fragment (or sequence variant thereof)], optionally with an epitope/affinity tag conjoined at (e.g. peptide bonded to) the N-terminal end.

[0718] A molecule (e.g. small molecule or biologic) that inhibits or prevents (reduces the propensity for) IF1 proteins (e.g. monomers or dimers thereof) combining to form tetramers (or higher oligomers) thereof, but which doesn't block IF1 protein monomers/dimers from inhibiting F₁F₀ ATP hydrolysis, preferably wherein it actually increases their inhibition of F₁F₀ ATP hydrolysis at the normal, alkaline pH (˜pH 8) of the mitochondrial matrix; and use of this molecule (for at least one use disclosed herein, e.g. for treating cancer and/or slowing aging in a subject, e.g. as at least one component of a cosmetic).

If1 Protein Fragments from all Species are Contemplated

[0719] In some embodiments, the administered IF1 protein/fragment (or sequence variant thereof) is from the same species that the subject belongs to.

[0720] In some embodiments, the administered IF1 protein/fragment (or sequence variant thereof) is from a different species than the subject belongs to.

[0721] In some embodiments, the administered IF1 protein/fragment (or sequence variant thereof) is from a longer-living (higher maximal lifespan) species than the subject belongs to; wherein if the subject is a mammal, in some embodiments, the administered IF1 protein/fragment (or sequence variant thereof) is from a longer-living (higher maximal lifespan) mammal species.

[0722] In some embodiments, the administered IF1 protein fragment (or sequence variant thereof) is from a shorter-living (lower maximal lifespan) species than the subject belongs to; wherein if the subject is a mammal, in some embodiments, the administered IF1 protein fragment (or sequence variant thereof) is from a shorter-living (lower maximal lifespan) mammal species.

### Screening for Some IF1 Protein Fragment Embodiments

[0723] Method of screening for least one IF1 protein fragment that can inhibit/reduce F₁F₀ ATP hydrolysis in a Sub-Mitochondrial Particle [SMP] assay of F₁F₀ ATP hydrolysis, at alkaline pH (e.g. pH 8), in which endogenous/native IF1 protein is not removed.

[0724] This method will find IF1 protein fragments inhibiting F₁F₀ ATP hydrolysis by both the aforementioned mechanisms of action: those binding ATP synthase and inhibiting F₁F₀ ATP hydrolysis directly, and those binding a C-terminal region of complete endogenous IF1 protein, blocking its inactivation by tetramer (and higher oligomer) formation/sequesteration, but wherein its binding doesn't occlude the (predominantly)N-terminal inhibitory domain (e.g. 14-47 or 1-60 residues), thence freeing active IF1 protein dimers/monomers that can inhibit F₁F₀ ATP hydrolysis. If instead, IF1 protein depleted SMPs are used (e.g. via method of Horstman L L, Racker E 1970 J. Biol. Chem. 245, 1336-1344), only IF1 protein fragments working by the first mechanism will be found by this screening method. Because of this it is preferred that the SMPs are not IF1 protein depleted. And because this assay is performed at pH 8, and not pH 6.7, there is no need to remove the endogenous IF1 protein anyhow. Because most of it is inactivated by tetramerization (and higher oligomerization) at this alkaline pH.

[0725] A method of the above, wherein a number of different IF1 protein fragments are systematically tested, preferably wherein the first IF1 protein fragment tested consists of the most C-terminal (last) residue of an IF1 protein (non-limiting e.g. of Bos taurus), the second fragment tested consists of the last two residues, the third fragment consists of the last three residues, the fourth fragment consists of the last four residues, and this testing is iterated in this fashion, adding a residue each time (optionally testing until the N-terminal end of the IF1 protein is reached, or stopping before this, optionally stopping once the 47th residue [from the N-terminal end, using “mature” {without MIS} IF1 protein numbering] is reached, or when a residue nearby is reached). Then, with each fragment found to have inhibition/reduction of F₁F₀ ATP hydrolysis activity, the fragment sequence is tested again but with its most C-terminal (last) absent, and then again iteratively, each time with one more amino acid removed from its C-terminal end, until the activity is lost or until there are no residues remaining.

[0726] This method will find a number of different IF1 protein fragments that can inhibit/reduce F₁F₀ ATP hydrolysis at alkaline pH (e.g. pH 8). These are novel therapeutic peptides, which are componentry to this disclosure (as is their use, e.g. for at least one use disclosed herein), as are functional [e.g. verified by aforementioned SMP assay] sequence variants thereof (as is their use, e.g. for at least one use disclosed herein). And they are advantageously (e.g. for cellular entry alone or as part of a fusion protein) short.

[0727] Optionally wherein this method is repeated with fragments from the IF1 protein of a different species, optionally wherein it is performed with fragments from the IF1 protein of a number of different species.

[0728] In an optional next step(s), for each of the selected peptides, or for only one or more of the most potent (e.g. low EC₅₀ against F₁F₀ ATP hydrolysis), an alanine scan is performed, wherein each residue position is iteratively substituted to alanine, and the ability to inhibit/reduce F₁F₀ ATP hydrolysis at alkaline pH (e.g. pH 8), in an SMP assay of F₁F₀ ATP hydrolysis (with endogenous IF1 protein present and not removed), is assayed each time, to identify key amino acid residues, and, by contrast, those that can be changed without (much) loss of activity (or that actually increase activity), wherein sequence variants with an amino acid changed at one or more of these positions are componentry to this disclosure.

[0729] Also componentry are sequence variants wherein an amino acid(s) is changed to be a different amino acid that a different species has at the equivalent position in their IF1 protein.

[0730] Functional sequence variants of all these fragments are componentry to this disclosure (as is their use, e.g. for at least one use disclosed herein).

[0731] With these methods in hand, variations of these methods will be apparent to those of the art, which are herein contemplated, and componentry to this disclosure.

[0732] Optionally wherein each IF1 protein fragment(s) (or sequence variant(s) thereof) selected by this method (i.e. shown to reduce F₁F₀ ATP hydrolysis) is tested in an SMP assay of F₁F₀ ATP synthesis, optionally wherein if it appreciably reduces F₁F₀ ATP synthesis also, it is dismissed.

### ATP Synthase Protein Fragments are Contemplated

[0733] When IF1 protein binds ATP synthase, to inhibit its F₁F₀ ATP hydrolysis, the C-terminal domain of IF1 protein does still bind ATP synthase (although, as aforementioned, this binding isn't absolutely required for it to inhibit F₁F₀ ATP hydrolysis). Wherein, by some non-limiting reports, it may bind in the C-terminal region of the β sub-unit of F1. In some embodiments, a peptide/protein fragment comprising (or consisting of) a part(s) of ATP synthase that the C-terminal domain of IF1 protein binds, is used as a fragment to increase inhibition of F₁F₀ ATP hydrolysis at alkaline/normal pH of mitochondrial matrix (pH 8), wherein this fragment binds to the C-terminal domain of IF1 protein, preventing its inactivation via tetramerization (and higher oligomerization), freeing IF1 protein dimers/monomers that can inhibit F₁F₀ ATP hydrolysis.

### A Screening Methodology

[0734] A non-limiting method to find some amino acid sequence embodiments of this disclosure is to read the sequence of a known IF1 protein (or, in different embodiments, any amino acid sequence known to inhibit/reduce F₁F₀ ATP hydrolysis), or a fragment thereof, and to synthesize it, and/or sequence variants of this sequence which are within at least 30% or (in a different embodiment) at least 40% or (in a different embodiment) at least 50% or (in a different embodiment) at least 60% or (in a different embodiment) at least 70% or (in a different embodiment) at least 80% or (in a different embodiment) at least 85% or (in a different embodiment) at least 90% or (in a different embodiment) at least 95% sequence identity (and in further embodiments: >96%, >97%, >98%, >99%, >99.5%, >99.8% sequence identity; in some preferred embodiments >70% or >80% or >90% or >95% or 97% sequence identity is selected as a cut-off for sequences to test, above which a sequence is selected for testing, below which it isn't), and independently test each version in an SMP assay of the art (e.g. as described herein and/or one or more references herein), independently testing its action (or lack thereof) upon (firstly) F₁F₀ ATP hydrolysis and (if it reduces/inhibits F₁F₀ ATP hydrolysis) F₁F₀ ATP synthesis, to test whether it can specifically inhibit/reduce F₁F₀ ATP hydrolysis (i.e, wherein it doesn't inhibit/reduce F₁F₀ ATP synthesis at all, or only a small amount as compared to its inhibition/reduction of F₁F₀ ATP hydrolysis, in an SMP assay of the art; preferably testing for action upon F₁F₀ ATP hydrolysis first, and only if an effect is seen, is action upon F₁F₀ ATP synthesis assayed). If yes, it is an amino acid sequence embodiment of this disclosure, and its use (for at least one use disclosed herein) is hereby contemplated (optionally via incorporation into a fusion protein of this disclosure also comprising one or more of a CPP, MIS, epitope/affinity tag). Optionally, the SMP assay can be conducted at pH 6, in which case it is prudent to remove the endogenous IF1 protein in the assay beforehand (e.g. via method of Horstman L L, Racker E 1970 J. Biol. Chem. 245, 1336-1344), or optionally (and much more preferably) at pH 8, wherein amino acid sequences that can inhibit/reduce F₁F₀ ATP hydrolysis at pH 8 are especially favoured. Note that pH 8 is the typical pH of the mitochondrial matrix. When testing at pH 8, the endogenous IF1 protein can be removed beforehand, but this assay will then only report on amino acid sequences that can inhibit/reduce F₁F₀ ATP hydrolysis by acting directly on ATP synthase, and it will likely miss those amino acid sequences that inhibit/reduce F₁F₀ ATP hydrolysis indirectly by acting upon IF1 protein to break up higher (>dimer) IF1 protein oligomers (which form at alkali pH), liberating IF1 protein dimers/monomers that can then inhibit F₁F₀ ATP hydrolysis. To find the latter, using SMPs sourced from big animal species, which tend to have more IF1 protein [117], is preferred (e.g. bovine SMPs are favoured over those of rat), especially those reared in warm temperatures (tends to increase IF1 protein amount [117]). In a particular embodiment, if an amino acid sequence is already known to inhibit/reduce F₁F₀ ATP hydrolysis (for example if the method converges upon the entirety of a sequence of a known IF1 protein) then it is excluded from this method.

[0735] This method has been described with an SMP assay, but it can alternatively (or in addition) be used with an alternative assay of F₁F₀ ATP hydrolysis, for example in an applicable cellular/sub-cellular/molecular assay of the art.

[0736] In different embodiments, instead, or in addition, a different type of assay can be used, investigating whether the tested amino acid sequence can stop/reduce IF1 protein tetramer, and higher oligomer, formation at pH 8 (or higher), thence increasing the prevalence of the monomer and/or dimer IF1 protein species (e.g. using the assay or variant thereof of [190]). If it does, then preferably a 2^{nd} assay is performed, testing whether these IF1 protein monomers/dimers with the amino acid sequence bound can still inhibit F₁F₀ ATP hydrolysis, optionally by an SMP assay, preferably with its endogenous IF1 protein not removed (and preferably using SMPs sourced from a large animal species e.g. bovine), preferably performed at pH 8 (or higher).

[0737] When an amino acid sequence shorter than 150 amino acids long, and more preferably shorter than 100, and more preferably shorter than 50, and more preferably shorter than 20, and more preferably shorter than 10 amino acids long, and more preferably shorter than 7 amino acids long, is found to inhibit/reduce F₁F₀ ATP hydrolysis, in further embodiments it is (optionally with another amino acid [s], which can be non-proteingenic, e.g. a D-amino acid) partially/completely integrated into a cyclic form, preferably a bicyclic form, into both (not recommended because this might assist rather than disrupt IF1 protein tetramerization and higher oligomerization) or very preferably into just one of the cycles (if only one, then other cycle has random/CPP/MPP sequence and/or a sequence that can increase plasma stability and/or a sequence optimized for higher log P/lipophibicity and/or a CPP sequence with successful precedent use in a bicyclic form {e.g. refer U.S. Pat. No. 10,626,147B2} and/or other sequence), and is tested again in this SMP assay, in this form. Wherein if it still inhibits/reduces F₁F₀ ATP hydrolysis in this form, this form is then componentry to this disclosure and its use in this form (for at least one use disclosed herein) is hereby contemplated.

[0738] Administering to a subject a combination of peptide(s) and/or protein(s) and/or polynucleotide(s) and/or vector(s) and/or cell(s) and/or transgenic organism(s) of/in this disclosure is contemplated.

[0739] The (optionally synergistic) use (for at least one use disclosed herein) of a combination of more than one type of IF1 protein/fragment (or sequence variant thereof, or concatenation of fragments thereof) is componentry to this disclosure.

[0740] The (optionally synergistic) use (for at least one use disclosed herein) of a combination of at least one type of IF1 protein (or sequence variant thereof) and at least one type of IF1 protein fragment (or sequence variant thereof) is componentry to this disclosure. Synergy particularly applies when the IF1 protein fragment (or sequence variant thereof) acts to block/reduce higher (>dimer) oligomerization with the added IF1 protein (or sequence variant thereof). This is a preferred combination. Especially for use in a species that doesn't have much IF1 protein, which tends to be a smaller, faster heart rate, shorter-lived species such as mice (and so an IF1 fragment that blocks/reduces IF1 protein >tetramerization will work much better if complete IF1 protein is administered also). Nucleotide sequences encoding these combination of amino acid sequences are hereby contemplated. As are nucleotide sequences with gene expression control elements set to optimize the relative expression/stoichiometry of these amino acid sequences for most efficacious combination (or vector thereof), to inhibit/reduce F₁F₀ ATP hydrolysis, inside a cell.

Some Sequences of this Disclosure

[0741] Componentry to this disclosure is any peptide/protein/amino acid sequence, and/or use thereof (for at least one use disclosed herein), incorporated by the teaching of this disclosure, including any peptide/protein/amino acid sequence incorporated by the teaching of its Description section and/or actually shown/exemplified in its Description and/or Sequence Listing and/or Drawings.

[0742] Componentry to this disclosure is: a peptide/protein comprising (or consisting of) at least one amino acid sequence of/in this disclosure, a polynucleotide comprising (or consisting of) at least one nucleotide sequence of/in this disclosure. Herein, when an amino acid sequence is referred to, in preferred embodiments this refers to a peptide/protein comprising (or consisting of) this amino acid sequence. Herein, when a nucleotide sequence is referred to, in preferred embodiments this refers to a polynucleotide comprising (or consisting of) this nucleotide sequence.

[0743] Incorporated by reference is the material in the corresponding Sequence Listing to this application. Which is submitted as an ASCII text file, named “Sequence Listing”, created on 20 Jan. 2021, with a size of 3,594,615 bytes.

[0744] The corresponding Sequence Listing is componentry to this application. This Sequence Listing forms part of the international application.

[0745] “Sequence Listing Free Text”: text in one or more <223> entries (“Other information”) “which does not use language-neutral vocabulary as referred to in paragraph 2 (vii)” of WIPO Standard ST.25 (N.B. L-amino acids commonly found in naturally occurring proteins, in 3-letter code, are language neutral vocabulary and so are not shown here): “Xaa at this position is a single (one, 1) amino acid selected from the following options:”; “Xaa at this position is a single (one, 1) amino acid (or lack thereof) selected from the following options:”; “Xaa is a single (one, 1) amino acid (or lack thereof) INDEPENDENTLY selected for each of these positions from the following options:”; “or is absent (no amino acid at this position and so this position is not present)”; “If adjacent residues are both cysteine, optionally they can be connected by a disulfide, instead of a peptide, bond”; “Epitope/affinity tag”; “These amino acids are D-amino acids”; “Encompasses natural & artificial PRT sequences; artificial sequences designed by aligning (by their “pH dependence motif”) some natural IF1 protein sequences sourced from InterPro family IPR007648; more detail elsewhere in present application”; “Encompasses natural & artificial PRT sequences; artificial sequences designed by manual alignment (by their “pH dependence motif”) of natural IF1 protein sequences from some long-lived species; more detail elsewhere in present application”; “Encompasses natural & artificial PRT sequences; artificial sequences designed by manual alignment and manipulation (described elsewhere in present application) of some natural IF1 protein sequences”; “Designed; as detailed elsewhere in present application”; “Xaa is INDEPENDENTLY selected at each position from any amino acid or lack thereof (no amino acid at this position and so this position is not present)”; “OPTIONALLY wherein one or more amino acids have a (independently selected in each case) lipid moiety covalently attached e.g. fatty acid, cholesterol etc.”; “OPTIONALLY wherein there is a fatty acid acylated to this sequence's N-terminus”; “OPTIONALLY one or more lysine residues (if present) have a fatty acid conjugated/acylated to their side-chain”; “Cell Penetrating Peptide (CPP) sequence”; “Optionally wherein one or more of the amino-acids are corresponding D-amino acids”; “D-amino acid”; “INDEPENDENTLY selected at each position from: L- or D-Arg/Lys/Phe/Trp/Tyr/Gln/phenylglycine/diphenylalanine/cyclohexylalanine/3-2- or 3-1-naphthylalanine/aminooctanoic acid/O-Methyltyrosine/2,6-dimethyltyrosine or absent”; “INDEPENDENTLY selected at each position from: L- or D-Arg/Lys/Phe/Trp/diphenylalanine/cyclohexylalanine/3-2- or 3-1-naphthylalanine/aminooctanoic acid/2,6-dimethyltyrosine or absent”; “INDEPENDENTLY selected at each position from: L- or D-Arg/Phe/diphenylalanine/cyclohexylalanine/3-2- or 3-1-naphthylalanine/aminooctanoic acid/2,6-dimethyltyrosine or absent”; “INDEPENDENTLY selected at each position from: L- or D-Arg/Phe/diphenylalanine/cyclohexylalanine/3-2- or 3-1-naphthylalanine/2,6-dimethyltyrosine or absent”; “INDEPENDENTLY selected at each position from: L- or D-Arg/diphenylalanine/cyclohexylalanine/3-2- or 3-1-naphthylalanine/2,6-dimethyltyrosine or absent”; “INDEPENDENTLY selected at each position from: L- or D-Arg/diphenylalanine/3-2- or 3-1-naphthylalanine/2,6-dimethyltyrosine or absent”; “INDEPENDENTLY selected at each position from: L-arginine or D-arginine or 2,6-dimethyl-L-tyrosine or 2,6-dimethyl-D-tyrosine”; “INDEPENDENTLY selected at each position from: L- or D-Arg/3-2- or 3-1-naphthylalanine, 3,3-diphenyl-L-alanine, 3,3-diphenyl-D-alanine, or absent”; “INDEPENDENTLY selected at each position from: L-arginine, D-arginine, L-phenylalanine, D-phenylalanine or absent”; “INDEPENDENTLY selected at each position from: L- or D-diphenylalanine/cyclohexylalanine/3-2- or 3-1-naphthylalanine/2-aminooctanoic acid/2,6-dimethyltyrosine or absent”; “INDEPENDENTLY selected at each position from: L-arginine or D-arginine or absent”; “L- or D-diphenylalanine/cyclohexylalanine/3-2- or 3-1-naphthylalanine/2-aminooctanoic acid/2,6-dimethyltyrosine or absent L-arginine or D-arginine or absent”; “D-arginine”; “L-3-cyclohexylalanine or D-3-cyclohexylalanine”; “L-3-(1-naphthyl) alanine or D-3-(1-naphthyl) alanine or L-3-(2-naphthyl) alanine or D-3-(2-naphthyl) alanine”; “L-2-aminooctanoic acid or D-2-aminooctanoic acid”; “3,3-diphenyl-L-alanine or 3,3-diphenyl-D-alanine”; “O-Methyl-L-tyrosine or O-Methyl-D-tyrosine”; “D-phenylalanine”; “L-phenylglycine or D-phenylglycine”; “any amino acid or absent”; “D-glutamine”; “L-3-cyclohexylalanine or D-3-cyclohexylalanine”; “2,6-dimethyl-L-tyrosine or 2,6-dimethyl-D-tyrosine”; “L- or D-diphenylalanine/cyclohexylalanine/3-2- or 3-1-naphthylalanine/2-aminooctanoic acid/2,6-dimethyltyrosine”; “L- or D-diphenylalanine/cyclohexylalanine/3-2- or 3-1-naphthylalanine/2-aminooctanoic acid/2,6-dimethyltyrosine or absent”; “L-arginine or D-arginine”; “L-arginine or D-arginine or absent”; “L-phenylalanine or D-phenylalanine”; “L-phenylalanine or D-phenylalanine or absent”; “Xaa can be any naturally occurring amino acid”; “This Cys is disulfide bonded to the Cys in the following sequence:”; “Synthetic fragment”.

[0746] In the Sequence Listing component of this application, at one or more locations where <221> (Name/key of feature) is populated with “MISC_FEATURE” or “misc_feature”, in alternative embodiments this is populated with “VARIANT” instead.

[0747] The WIPO ST.25 standard doesn't permit the showing of a D-amino acid(s). For all sequences in the Sequence Listing of this application, in other disclosure embodiments, a corresponding D-amino acid replaces an L-amino acid at one or more places (e.g. D-arginine replaces L-arginine at one or more places).

[0748] At some points herein, an IF1 protein is referred to as “mature”, when it is without its Mitochondrial Import Sequence (MIS) attached, and “immature” when an MIS is attached. By default (unless the context suggests otherwise), at every point that an IF1 protein/fragment (or sequence variant thereof) is referred to herein, simultaneously, in some embodiments this encompasses it with an MIS attached, and in other embodiments without an MIS attached.

[0749] Contemplated by this disclosure is any IF1 protein (and/or sequence variant thereof), and use thereof (for at least one use disclosed herein), fragment/sub-sequence thereof (and/or sequence variant thereof), and use thereof (for at least one use disclosed herein), concatenation of fragments thereof (and/or sequence variant thereof), and use thereof (for at least one use disclosed herein).

[0750] When a Mitochondrial Import Sequence (MIS) is referred to herein, in preferred embodiments this MIS targets itself, and its attachment(s), to the mitochondrial matrix compartment (as opposed to a different compartment within mitochondria e.g. its Intermembrane Space [IMS]). In further preferred embodiments, the MIS of an IF1 protein is utilized.

[0751] All IF1 protein sequences (all sequence versions) in the InterPro “IPR007648” and/or Pfam “PF04568” protein families, and their sub-sequences (and concatenations of their sub-sequences), are componentry to this disclosure, as is their use thereof (for at least one use disclosed herein). To develop some amino acid sequences of this disclosure, I retrieved the proteins, in one-letter amino acid code, from the IPR007648 set and searched (using “regular expression” search in notepad++computer program) for the string “HxxxxxH”, wherein x can be any character (any naturally occurring amino acid) and His histidine (FIG. 10B, residues 36-42 of SEQ ID NO:676), dismissing all the sequences without it. I then manually aligned the remaining sequences to co-correspond/overlap at this motif (aligning the two flanking histidines). Then I made a note of, across all these sequences, which amino acids were found at each position over the entirety of their length. In order to generate a Markush type sequence, a truncated length of which is disclosed herein (SEQ ID NO:1) [in different embodiments the un-truncated length is SEQ ID NO:1 instead (not shown)], within which are some amino acid sequence embodiments of this disclosure, which inhibit/reduce F₁F₀ ATP hydrolysis (for example inside a cell or in an SMP assay of F₁F₀ ATP hydrolysis), and the use of one or more of these (for at least one use disclosed herein) is componentry to this disclosure. Shorter sub-sequences of this Markush type sequence, and the use of one or more of their componentry sequences (for at least one use disclosed herein), are also componentry to this disclosure. Concatenations of shorter sub-sequences of this Markush type sequence, and the use of one or more of their componentry sequences (for at least one use disclosed herein), are also componentry to this disclosure. The method used inherently dismisses some IF1 proteins, from some species, because not all have the “HxxxxxH” motif employed. But they do still have a pH dependence motif. Just with a different residue than histidine at the position that corresponds to the 55^{th} position of “mature” (without MIS) bovine IF1 protein. In such cases their 56^{th} position is typically histidine. So such sequences can be retrieved using the aforementioned method, but wherein the “HxxxxxxH” regular expression is used in the notepad++program instead, wherein x can be any character. In alternative embodiments, componentry to this disclosure, but not shown, such IF1 proteins are not dismissed, as they were, and are also incorporated into SEQ ID NO:1, and SEQ ID NO:2, and any derived sequences of one or both thereof. In other embodiments, the aforementioned method is performed using a different motif(s) characteristic to all/many IF1 proteins instead. Optionally a different aspect(s) to the “pH dependence motif” and/or utilizing other IF1 protein feature(s) shown in FIG. 10.

[0752] ≙ is symbol for “corresponding to”. SEQ ID NO:2 is the same as SEQ ID NO:1 except that its 175^{th} and 181^{st} residues (corresponding to [≙] H49 and H55 in “mature” human IF1 protein) aren't restricted to being histidine, and the possible scope of its 140^{th}, 152^{nd}, 174^{th}, and 182^{nd} residues (≙S14, E26, H48 and H56 in “mature” human IF1 protein) is broadened, such that each aforementioned residue can be any amino acid coded for by the genetic code. In preferred embodiments, the 175^{th} residue is lysine or alanine or arginine (≙H49K or H49A or H49R), and/or the 152^{nd} residue is glutamine or alanine (≙Q26, E26Q, E26A, or Q26A), and/or one or more of the 140^{th}, 174^{th}, 181^{st} and 182^{nd} residues is alanine (≙one or more of A14/S14A/T14A, H48A/Y48A, H55A, H56A/T56A/S56A).

[0753] A sub-sequence/fragment, or concatenated fragments thereof, of SEQ ID NO:2 (or of any sequence herein) is contemplated. A preferred sub-sequence of SEQ ID NO:2 is a sequence comprising (or consisting of) one or more of the following sub-sequences: its residues: 127-210 (≙“mature” bovine IF1 protein), 102-210 (ϑbovine IF1 protein with an N-terminal Mitochondrial Import Sequence [MIS]), 102-207 (≙human/mouse IF1 protein with MIS), 127-207 (≙human/mouse “mature” IF1 protein without MIS), 102-208 (≙rat IF1 protein with MIS), 127-208 (≙rat “mature” IF1 protein without MIS), 140-173 (≙14-47 of bovine IF1 protein, a “minimal inhibitory sequence” [141-142]), 168-184 (≙42-58 of bovine IF1 protein, an alternative “minimal inhibitory sequence” [144-147]), 168-185 (≙42-59 of bovine IF1 protein), 127-182 (1-56 of bovine IF1 protein), 127-183 (≙1-57 of bovine IF1 protein), 127-184 (≙1-58 of bovine IF1 protein), 127-185 (≙1-59 of bovine IF1 protein), 127-186 (≙1-60 of bovine IF1 protein, cannot dimerize, exists as monomer [143]), 137-182 (≙10-56 of bovine IF1 protein), 137-183 (≙10-57 of bovine IF1 protein), 137-184 (≙10-58 of bovine IF1 protein), 137-185 (≙10-59 of bovine IF1 protein), 137-186 (≙10-60 of bovine IF1 protein), 140-172 (14-46 of bovine IF1 protein), 140-171 (14-45 of bovine IF1 protein), 140-170 (≙14-44 of bovine IF1 protein), 140-169 (≙14-43 of bovine IF1 protein), 140-168 (≙14-42 of bovine IF1 protein), 140-167 (≙14-41 of bovine IF1 protein), 139-173 (≙13-47 of bovine IF1 protein), 138-173 (≙12-47 of bovine IF1 protein), 137-173 (≙11-47 of bovine IF1 protein), 136-173 (≙10-47 of bovine IF1 protein), 135-173 (≙9-47 of bovine IF1 protein), 134-173 (≙8-47 of bovine IF1 protein), 133-173 (≙7-47 of bovine IF1 protein), 132-173 (≙6-47 of bovine IF1 protein), 131-173 (≙5-47 of bovine IF1 protein), 130-173 (≙4-47 of bovine IF1 protein), 129-173 (≙3-47 of bovine IF1 protein), 128-173 (≙2-47 of bovine IF1 protein), 127-173 (≙1-47 of bovine IF1 protein), 142-173 (≙16-47 of bovine IF1 protein), 143-173 (≙17-47 of bovine IF1 protein), 127-173 (≙1-47 of bovine IF1 protein), 127-182 (≙1-56 of bovine IF1 protein), 136-172 (≙10-46 of bovine IF1 protein), 141-173 (≙15-47 of bovine IF1 protein), 136-210 (≙10-84 of bovine IF1 protein), 140-210 (≙14-84 of bovine IF1 protein), 140-186 (≙14-60 of bovine IF1 protein), 174-182 (≙ of 48-56 of bovine IF1 protein), 175-181 (≙49-55 of bovine IF1 protein). Componentry to this disclosure is residues 102-126 (≙human/bovine/mouse/rat Mitochondrial Import Sequence [MIS]) concatenated to another sequence of this disclosure (preferably at the N-terminal end of the 2^{nd} sequence) e.g. to residues 140-173 or 168-184. Concatenated sequences of this disclosure are themselves sequences of this disclosure.

[0754] SEQ ID NO:3 is residues 102-210 of SEQ ID NO:2 (A-25 {with MIS} to 84 of bovine IF1 protein), optionally wherein 1, 2 or 3 of the C-terminal residues are absent (e.g. to correspond to −25 {with MIS} to 81 of mouse/human IF1 protein), and/or optionally with 1 to 5 aspartic acid (D) residues added on the C-terminal end.

[0755] SEQ ID NO:4 is residues 127-210 of SEQ ID NO:2 (≙1 to 84 of bovine IF1 protein), optionally wherein 1, 2 or 3 of the C-terminal residues are absent (e.g. to correspond to 1 to 81 of mouse/human IF1 protein), and/or optionally with 1 to 5 aspartic acid (D) residues added on the C-terminal end.

Some IF1 Proteins, Including Some Novel IF1 Proteins by the Teaching of this Disclosure:

[0756] SEQ ID NO:5 is a Markush type sequence, largely within the amino acid sequence space of SEQ ID NO: 1 (but not completely because I found further IF1 proteins, not in the Interpro IPR007648 set, for which this Markush was broadened to encompass, which was especially important because these further IF1 proteins were from absolutely long-lived, and/or long-lived for their size, species), produced from a manual alignment of some IF1 protein sequences, wherein the initiation residue (M) and H49 residue (“mature” protein numbering) of each is in alignment with the initiation (M) and H49 residues respectively of human IF1 protein. The aligned IF1 proteins used to make SEQ ID NO:5 were a subset (those with the aforementioned alignment to human IF1 protein) of those in FIG. 10 (corresponding wild-type sequence IF1 proteins were used instead of mutants).

[0757] SEQ ID NO:6 is a consensus type sequence, within the amino acid sequence space of SEQ ID NO:5, which has the most commonly observed residue(s) at each position.

[0758] SEQ ID NO:7 is a Markush type sequence encompassing a sub-space of SEQ ID NO:5, encompassing IF1 protein sequences from some long-lived, either absolutely and/or for their size, species (the IF1 protein sequences used are a sub-set of those in FIG. 10P).

[0759] A Markush type sequence, and the sequences within it (and use of one or more thereof [for at least one use disclosed herein]), encompassing IF1 protein sequences from more and/or different long-lived species, long-lived either absolutely and/or for their size (wherein the former is more preferred), is componentry to this disclosure.

[0760] SEQ ID NO:8 is a consensus type sequence, within the amino acid sequence space of SEQ ID NO:7, which has the most commonly observed residue(s) at each position.

[0761] SEQ ID NO:9 is a Markush type sequence encompassing a sub-space of SEQ ID NO:7, encompassing IF1 protein sequences from some long-lived (in absolute terms, not just for their size) species: bowhead, fin, blue, humpback, killer, sperm, gray, Cuvier's beaked, long-finned pilot whales, human, West Indian manatee, African bush elephant, Gorilla.

[0762] SEQ ID NO:10 is a consensus type sequence, within the amino acid sequence space of SEQ ID NO:9, which has the most commonly observed residue(s) at each position.

[0763] SEQ ID NO:11 is a Markush type sequence encompassing a sub-space of SEQ ID NO:9, encompassing IF1 protein sequences from some very long-lived species: bowhead, fin, blue, whales and human.

[0764] SEQ ID NO:12 is a consensus type sequence, within the amino acid sequence space of SEQ ID NO:11, which has the most commonly observed residue(s) at each position. Incidentally, which actually corresponds to “immature” (with Mitochondrial Import Sequence still attached) IF1 protein sequence from bowhead whale.

[0765] SEQ ID NO:13 is the same as SEQ ID NO:12 except that its first 25 residues, its Mitochondrial Import Sequence (MIS), is different, being that of SEQ ID NO:5.

[0766] SEQ ID NO:14 is the same as SEQ ID NO:12 except that its first 25 residues, its Mitochondrial Import Sequence (MIS), is different, being that of human IF1 protein.

[0767] SEQ ID NO:15 is the same as SEQ ID NO:12 except that its first 25 residues, its Mitochondrial Import Sequence (MIS), is different, being that of mouse IF1 protein.

[0768] SEQ ID NO:16 is a Markush type sequence that (partially) encompasses all the naturally occurring IF1 protein sequences of FIG. 10 (corresponding wild-type sequence IF1 proteins were used instead of mutants), including:
[0769] [a] those sequences whose initiation residue (M) and H49 residue (“mature” IF1 protein numbering) is in simultaneous alignment with those of human IF1 protein and
[0770] [b] (in distinction to SEQ ID NO:5) also those sequences whose initiation residue (M) and H49 residue (“mature” protein numbering) do not simultaneously align with those of human IF1 protein, wherein these were aligned against the human IF1 protein, such that their H49 residues aligned, and then, for this sub-set (corresponding to this bullet point [b]), only the IF1 protein part that aligned with the “mature” (without its Mitochondrial Import Sequence [MIS]) human IF1 protein was incorporated into this Markush type sequence.

[0771] SEQ ID NO:17 is a Markush type sequence with its first 25 residues being the same as the first 25 residues of SEQ ID NO:5, which corresponds to a Mitochondrial Import Sequence (MIS), attached to a “mature” IF1 protein sequence, which is a Markush type sequence encompassing IF1 protein sequences from some very long-lived species: bowhead, fin, blue, whales, Galápagos tortoise, Eastern box turtle and human.

[0772] SEQ ID NO:18 is a consensus type sequence, within the amino acid sequence space of SEQ ID NO:17, which has the most commonly observed residue(s) at each “mature” IF1 protein position.

[0773] SEQ ID NO:19 is the same as SEQ ID NO:18 except that its first 25 residues, its Mitochondrial Import Sequence (MIS), is different, being that of human IF1 protein.

[0774] SEQ ID NO:20 is the same as SEQ ID NO:18 except that its first 25 residues, its Mitochondrial Import Sequence (MIS), is different, being that of mouse IF1 protein.

[0775] SEQ ID NO:21 is the same as SEQ ID NO:16 except that it has the possibility of 1 to 5 more aspartic acid (D) residues at its C-terminal end. Longer living species, as a function of a more potent IF1 protein at normal mitochondrial matrix pH (8), tend to have more aspartic acid residues at the C-terminal end of their IF1 protein.

### Some Sequence Variants Thereof

[0776] SEQ ID NO:22 to SEQ ID NO:38 are the same as SEQ ID NO:5 to SEQ ID NO:21 respectively, except that their 74^{th} and 80^{th} residues (corresponding to (A) H49 and H55 in “mature” human IF1 protein) are not restricted to being histidine, and the possible scope of their 39^{th}, 51^{st}, 73^{rd}, and 81^{st} residues (corresponding to (A) S14, E26, H48 and H56 in “mature” human IF1 protein) is broadened, such that each aforementioned residue can be any amino acid coded for by the genetic code. In preferred embodiments, the 74^{th} residue is lysine or alanine or arginine (+H49K or H49A or H49R), and/or the 51^{st} residue is glutamine or alanine (≙Q26, E26Q, E26A, or Q26A), and/or one or more of the 39th, 73^{rd}, 80^{th} and 81^{st} residues is alanine (≙one or more of A14/S14A/T14A, H48A/Y48A, H55A, H56A/T56A/S56A). SEQ ID NO:39 to SEQ ID NO:55 are the same as SEQ ID NO:22 to SEQ ID NO:38 respectively, except that their 74^{th} residue is delimited to histidine, lysine or alanine (+H49/H49K/H49A), their 51^{st} residue is delimited to glutamic acid, glutamine or alanine (+E26/Q26/E26Q/E26A/Q26A), their 39^{th} residue is delimited to serine, threonine or alanine (≙A14/S14/T14/S14A/T14A), their 73^{rd} residue is delimited to histidine, tyrosine or alanine (+H48/Y48/H48A/Y48A), and their 80^{th} and 81^{st} residues are each independently delimited to histidine or alanine (+H55/H55A, H56/H56A/T56A/S56A). In particular preferred embodiments, the 74^{th} residue is lysine (≙H49K) and/or the 39^{th} residue is alanine (≙A14/S14A/T14A). SEQ ID NO:56 to SEQ ID NO:72 are the same as SEQ ID NO:22 to SEQ ID NO: 38 respectively, except that their 74^{th} residue is delimited to lysine (≙H49K). SEQ ID NO:73 to SEQ ID NO:89 are the same as SEQ ID NO:22 to SEQ ID NO:38 respectively, except that their 39th residue is delimited to alanine (≙A14/S14A/T14A). SEQ ID NO:90 to SEQ ID NO:106 are the same as SEQ ID NO:22 to SEQ ID NO:38 respectively, except that their 74^{th} residue is delimited to lysine (H49K) and their 39^{th} residue is delimited to alanine (≙A14/S14A/T14A). SEQ ID NO:107 to SEQ ID NO: 123 are the same as SEQ ID NO:22 to SEQ ID NO:38 respectively, except that their 74^{th} residue is lysine and their 39^{th}, 51^{st}, 73^{rd}, 80^{th} and 81^{st} residues are alanine (≙A14/S14A/T14A, E26A/Q26A, H48A/Y48A, H49K, H55A, H56A/T56A/S56A).

[0777] Other embodiments are SEQ ID NO:m, where m is an integer in the range 5-123 (different values of m are different embodiments), shorter at the C-terminal end by a number of residues selected from 1, 2, 3 and 4 residues, and/or with 1 to 5 additional aspartic acid (D) residues at its C-terminal end, and/or with the Mitochondrial Import Sequence (MIS) at the N-terminal end (first 25 residues) absent/replaced with a different MIS/substituted for the MIS of the species being administered to (even if this is longer than 25 residues), preferably the MIS of its native IF1 protein. In preferred embodiments, the MIS used is a MIS from the species being administered to, preferably the MIS of their native IF1 protein.

### CPP Sequences

[0778] SEQ ID NO:124 is a Markush type sequence/scheme that encapsulates major Tat sequence variants. With the possibility for a cysteine or glycine/proline (independently selected) at their N- and/or C-terminal end, wherein the former permits a disulphide bond to the cargo sequence (carrying a cysteine, either as part of its sequence naturally or artificially added for this purpose, wherein, if added, its added cysteine is optionally encapsulated in this present Markush scheme—so you will see at its N- and C-terminal ends there is the possibility of two adjacent cysteines, which, unlike the other connections in the Markush scheme, are bound by a disulphide rather than a peptide bond) and the latter can confer flexibility between the CPP and a peptide bonded cargo sequence, wherein in further embodiments, not represented in the Markush, this glycine/proline can actually be a plurality of glycine and/or proline residues up to 10 residues long. In the scheme, next to each possible cysteine residue is the possibility for an aliphatic reside (not in the scheme, but still contemplated, is to have multiple, up to 5 such residues), which can reduce the amount of “disulfide bond exchange” (U.S. Pat. No. 9,255,124B2). Note that in this present scheme, to repeat for stress, when the present residue and an adjacent residue are both cysteine, they are connected by a disulphide, instead of a peptide, bond (if both their side-chains are not being used in a disulfide bond already). One or more cysteine residues in this scheme can be independently substituted for one or more cysteine analogues e.g. penicillamine, alpha-methyl cysteine. One or more L-amino acids in this scheme can be substituted for their corresponding D-amino acid (e.g. D-arginine replaces L-arginine at one or more places). SEQ ID NO:125 is an equivalent Markush type sequence/scheme, with the same accompanying notes, but for Penetratin, SEQ ID NO:126 is that for a poly-Arginine CPP. SEQ ID NO: 124 to SEQ ID NO:126 are the most favoured CPPs for use herein, especially SEQ ID NO:126, and especially its encompassed R7 because of its clinical precedent ([192], U.S. Pat. No. 6,730,293B1), wherein its connection to the cargo sequence via a flanking cysteine and a disulphide bond, or via a peptide bond (optionally via one or more linker/spacer glycine and/or proline residues), is favoured, with peptide bond more favoured. In certain other embodiments, the CPP is selected from the group consisting of the amino acid sequences set forth in SEQ ID NO:440 to SEQ ID NO:638 (and in further embodiments, not shown, one or more of them is embodied with the possibility of one or two flanking cysteines for disulphide attachment to the cargo sequence, optionally with associated aliphatic residue(s), as exemplified with SEQ ID NO:124 to SEQ ID NO:126). In certain other embodiments, the CPP is a different CPP sequence of the art, not presented herein. The CPP component can be any amino acid sequence that facilitates entry of a peptide/protein into a cell. Wherein, in some preferred embodiments, a CPP that accumulates a notable fraction of its cargo to the cytoplasm and/or mitochondrial matrix is preferred.

### Cpp Sequence Concatenated to IF1 Protein (or Sequence Variant Thereof) Sequence

[0779] SEQ ID NO:q (or a sub-sequence thereof, or concatenated sub-sequences thereof) concatenated to SEQ ID NO: e (or a sub-sequence thereof, or concatenated sub-sequences thereof), wherein q is an integer selected from the range 124-126 (or from the range 440-638), and e is an integer selected from the range 1-123 (or the more preferred range 5-123), [different values of q and/or e are different embodiments; within their aforementioned range constraints, all possible combinations of q and e integer values are contemplated]. To illustrate with some non-limiting examples:
[0780] SEQ ID NO:127 is SEQ ID NO:124 concatenated to SEQ ID NO:38;
[0781] SEQ ID NO:128 is SEQ ID NO:125 concatenated to SEQ ID NO:38;
[0782] SEQ ID NO:129 is SEQ ID NO:126 concatenated to SEQ ID NO:38;

[0783] wherein truncated sequences thereof are contemplated. For non-limiting example, truncated at its C-terminal end by a number (integer) of residues selected from the numerical range 1 to 45 (different integers in different embodiments). For non-limiting example, residues 1-81 of SEQ ID NO:127, 1-84 of SEQ ID NO:128, 1-113 of SEQ ID NO:129, which all correspond to a CPP sequence concatenated to an IF1 protein fragment (≙1-60 bovine IF1 protein).

### Epitope/Affinity Tags:

[0784] An epitope/affinity tag sequence is useful for purification of a fusion protein, preferably wherein the tag sequence is at the N-terminal end of the fusion protein and it has a protease cleavage site at, or near, its C-terminal end such that it can be removed by said protease after enabling purification of the fusion protein (e.g. from a cultured unicellular organism(s) recombinantly producing it). SEQ ID NO:130 is HHHHHHDYKDDDDK, which can be cleaved by Enterokinase (cleavage site: DDDDK↓). In alternative embodiments, SEQ ID NO:130 is a different epitope/affinity sequence of the art [N.B. herein epitope and affinity tag are used interchangeably, wherein epitope tag can also refer to affinity tag, and vice-versa, and combination thereof] (e.g. refer to Pina A S, et al. Affinity tags in protein purification and peptide enrichment: An overview. Methods in molecular biology [Clifton, NJ] 1129:147-168). For non-limiting example, selected from poly-histidine, HHHHHH (SEQ ID NO:131), DYKDDDDK (FLAG epitope tag; SEQ ID NO:132), DLYDDDDK (Xpress epitope tag; SEQ ID NO:133), HHHHHHDLYDDDDK (SEQ ID NO:134), DYDDDDK (SEQ ID NO:135), HHHHHHDYDDDDK (SEQ ID NO:136), DTYRYI (SEQ ID NO:137), TDFYLK (SEQ ID NO:138), EQKLISEEDL (SEQ ID NO: 139), EEEEYMPME (SEQ ID NO:140), YPYDVPDYA (SEQ ID NO:141), RYIRS (SEQ ID NO: 142), PPEPET (SEQ ID NO:143), MGGSHHHHHHGMASMTGGQQMGRDLYDDDDKDPSS (SEQ ID NO:144), preferably incorporating (or fused to) a protease cleavage site (and/or a cleavage site cleavable by small molecule treatment) at/near its C-terminal end.

[0785] In some embodiments, a cleavable linker sequence is especially favoured between the epitope/affinity tag, situated at the N terminus, and the remainder of the fusion protein, permitting cleavage of the fusion after it has been recovered from its expression/host cell: a fusion protein prepared by a method comprising: (i) culturing a host cell comprising an expression vector comprising a nucleic acid encoding the fusion protein under conditions which provide for expression of said fusion protein encoded by the expression vector within the host cell; and recovering the fusion protein, optionally by way of an epitope/affinity tag sequence component to the fusion protein, optionally wherein this tag is then removed, optionally by the epitope/affinity tag sequence being connected to one end of the fusion protein, optionally the N-terminal end, by a cleavable linker sequence that is cleaved. A cleavable linker region(s) herein can be a protease cleavable linker or other type of cleavable linker of the art e.g. those cleavable by small molecules.

[0786] Some non-limiting examples of a cleavage site include Met-X sites, cleavable by cyanogen bromide, Asn-Gly, cleavable by hydroxylamine, Asp-Pro, cleavable by weak acid. But protease cleavage sites are preferred due to the milder cleavage conditions necessary. A non-limiting example is the sequence cut by Enterokinase (DDDDK↓; wherein, incidentally, DDDDK is a part of the FLAG epitope tag: DYKDDDDK [SEQ ID NO:132], and Xpress epitope tag: DLYDDDDK [SEQ ID NO:133]).

[0787] Histidine tags have an affinity for nickel/cobalt/zinc/copper/iron ions which have been immobilized by their forming coordinate covalent bonds with a chelator incorporated in the stationary phase. For elution, an excess amount of a compound able to act as a metal ion ligand, such as imidazole, is used. The poly-histidine component of the HHHHHHDYKDDDDK [SEQ ID NO:130] sequence permits isolation of the fusion protein by the aforementioned method, and its DYKDDDDK [residues 7-14 of SEQ ID NO:130] component confers a protease cleavage site for the HHHHHHDYKDDDDK [SEQ ID NO:130] sequence to be cut from the N-terminal end of the fusion protein after it has been isolated e.g. from cultured bacteria/yeast producing it recombinantly. Optionally an epitope/affinity tag is flanked by 1-5 glycines and/or prolines (increases flexibility between domains) at one or both of its ends in a fusion protein of this disclosure.

### Epitope/Affinity Tag Concatenated to CPP Sequence Concatenated to IF1 Protein (or Sequence Variant Thereof) Sequence:

[0788] SEQ ID NO:p (or a sub-sequence thereof, or concatenated sub-sequences thereof) concatenated to SEQ ID NO: q (or a sub-sequence thereof, or concatenated sub-sequences thereof) concatenated to SEQ ID NO: e (or a sub-sequence thereof, or concatenated sub-sequences thereof), wherein p is an integer selected from the range 130-144, q is an integer selected from the range 124-126 (or from the range 440-638), and e is an integer selected from the range 1-123 (or the more preferred range 5-123), [different values of p and/or q and/or e are different embodiments; within their aforementioned range constraints, all possible combinations of p, q, and e integer values are contemplated]. To illustrate with a non-limiting example: SEQ ID NO:145 is SEQ ID NO:130 concatenated to SEQ ID NO:126 concatenated to SEQ ID NO: 106;
[0789] wherein truncated sequences thereof are also contemplated; indeed, an alternative sequence is SEQ ID NO: 145 without its epitope/affinity tag component i.e. its residues 15-182 as a separate sequence, or a truncation thereof such as its residues 15-113 as a separate sequence; or wherein its CPP component is absent (so in this specific example case, wherein its residues 15-67 are absent and so its 14^{th} residue is directly concatenated to its 68^{th} residue). SEQ ID NO:145 truncated at its C-terminal end by a number (integer) of residues selected from the numerical range 1 to 45 (different integers in different embodiments), optionally additionally truncated at its N-terminal end e.g. such that it is without its epitope/affinity tag component.

[0790] In some embodiments, the CPP sequence component is absent and SEQ ID NO:p (or a sub-sequence thereof, or concatenated sub-sequences thereof) is concatenated to SEQ ID NO:e (or a sub-sequence thereof, or concatenated sub-sequences thereof), wherein p is an integer selected from the range 130-145, and e is an integer selected from the range 1-123 (or the more preferred range 5-123), [different values of p and/or e are different embodiments; within their aforementioned range constraints, all possible combinations of p and e integer values are contemplated].

### Some Non-Limiting IF1 Protein Sub-Sequences/Fragments:

[0791] First 25 residues (or other residues range) of SEQ ID NO:f concatenated to SEQ ID NO:e (or a sub-sequence thereof, or concatenated sub-sequences thereof), wherein f is an integer selected from the range 1-123 (or the more preferred range 5-123), and wherein e is an integer selected from the range 1-123 (or the more preferred range 5-123); optionally wherein SEQ ID NO:q (or a sub-sequence thereof, or concatenated sub-sequences thereof) is concatenated to the N-terminal end of SEQ ID NO:f in this fusion protein, wherein q is an integer selected from the range 124-126 (or from the range 440-638); optionally wherein SEQ ID NO:p (or a sub-sequence thereof, or concatenated sub-sequences thereof) is concatenated to the N-terminal end of this fusion protein (containing or not containing SEQ ID NO:q), wherein p is an integer selected from the range 130-145, [different values of f and/or e and/or q and/or p are different embodiments; within their aforementioned range constraints, all possible combinations of f, e, q, p integer values are contemplated]; optionally/preferably wherein the SEQ ID NO:e component is a fragment thereof, optionally/preferably being one of its following fragments (different fragments in different embodiments): its residues: u−o, wherein u is equal to or an integer greater than 26, o is equal to or an integer less than its total number of residues, and u<o, wherein to illustrate with some non-limiting examples: residues: 26-109, 27-109, 28-109, 29-109, 30-109, 31-109, 32-109, 33-109, 34-109, 35-109, 36-109, 37-109, 38-109, 39-109, 40-109, 41-109, 42-109, 43-109, 44-109, 45-109, 46-109, 47-109, 48-109, 49-109, 50-109, 51-109, 52-109, 53-109, 54-109, 55-109, 56-109, 57-109, 58-109, 59-109, 60-109, 61-109, 62-109, 63-109, 64-109, 65-109, 66-109, 67-109, 68-109, 69-109, 70-109, 71-109, 72-109, 73-109, 74-109, 75-109, 76-109, 77-109, 78-109, 79-109, 80-109, 81-109, 82-109, 83-109, 84-109, 85-109, 86-109, 87-109, 88-109, 89-109, 90-109, 91-109, 92-109, 93-109, 94-109, 95-109, 96-109, 97-109, 98-109, 99-109, 100-109, 101-109, 102-109, 103-109, 104-109, 105-109, 106-109, 107-109, 108-109, and, for each aforementioned fragment, all possible fragments thereof are also contemplated (e.g. truncated at C-terminus by a number of residues),
[0792] wherein to illustrate with some non-limiting examples: residues: 26-85, 35-85, 35-72, 38-72, 39-72, 39-71, 39-70, 39-69, 39-68, 39-67, 67-83, 73-81, 74-80 (≙1-60, 10-60, 10-47, 13-47, 14-47, 14-46, 14-45, 14-44, 14-43, 14-42, 42-58, 48-56, 49-55 of bovine IF1 protein),
[0793] wherein to illustrate with some particular non-limiting examples:
[0794] residues 1-25 of SEQ ID NO:38 (≙human/bovine/mouse/rat Mitochondrial Import Sequence [MIS]) concatenated to one of the following:
   [0795] residues 35-109 of SEQ ID NO:38 (≙10-84 of bovine IF1 protein);
   [0796] residues 39-109 of SEQ ID NO:38 (≙14-84 of bovine IF1 protein);
   [0797] residues 26-85 of SEQ ID NO:38 (≙1-60 of bovine IF1 protein);
   [0798] residues 35-85 of SEQ ID NO:38 (≙10-60 of bovine IF1 protein);
   [0799] residues 39-85 of SEQ ID NO:38 (≙14-60 of bovine IF1 protein);
   [0800] residues 35-72 of SEQ ID NO:38 (≙10-47 of bovine IF1 protein);
   [0801] residues 38-72 of SEQ ID NO:38 (≙13-47 of bovine IF1 protein);
   [0802] residues 39-72 of SEQ ID NO:38 (≙14-47 of bovine IF1 protein);
   [0803] residues 39-71 of SEQ ID NO:38 (≙14-46 of bovine IF1 protein);
   [0804] residues 39-70 of SEQ ID NO:38 (≙14-45 of bovine IF1 protein);
   [0805] residues 39-69 of SEQ ID NO:38 (≙14-44 of bovine IF1 protein);
   [0806] residues 39-68 of SEQ ID NO:38 (≙14-43 of bovine IF1 protein);
   [0807] residues 39-67 of SEQ ID NO:38 (≙14-42 of bovine IF1 protein);
   [0808] residues 67-83 of SEQ ID NO:38 (≙42-58 of bovine IF1 protein);
   [0809] residues 73-81 of SEQ ID NO:38 (≙48-56 of bovine IF1 protein);
   [0810] residues 74-80 of SEQ ID NO:38 (≙49-55 of bovine IF1 protein);
   [0811] residues x-y of SEQ ID NO:38 where x is an integer between 26 and 46 (≙between 1 and 20 of bovine IF1 protein), or between 26 and 69 (≙between 1 and 44 of bovine IF1 protein) or between 26 and 109 (≙between 1 and 84 of bovine IF1 protein), and y is an integer between 65 and 110 (≙between 40 and 85 of bovine IF1 protein), or between 75 and 110 (≙between 50 and 85 of bovine IF1 protein) or between 85 and 110 (≙between 60 and 85 of bovine IF1 protein) or between 27 and 110 (≙between 2 and 85 of bovine IF1 protein), [different values of x and/or y are different embodiments; within their aforementioned range constraints, all possible combinations of x and y integer values are contemplated];
   [0812] optionally wherein this fusion protein has a Cell Penetrating Peptide (CPP) sequence and/or epitope/affinity tag concatenated to its N-terminal end, wherein to illustrate with some particular non-limiting examples:
[0813] SEQ ID NO:146 is SEQ ID NO:130 (example epitope tag) concatenated to SEQ ID NO:124 (example CPP sequence) concatenated to the first 25 residues of SEQ ID NO:38 (Mitochondrial Import Sequence) concatenated to residues 26-85 of SEQ ID NO:38 (≙1-60 of bovine IF1 protein);
   [0814] SEQ ID NO:147 is the same but instead of residues 26-85, it has residues 35-85 of SEQ ID NO: 38 (≙10-60 of bovine IF1 protein);
   [0815] SEQ ID NO:148 is of the same form but instead has residues 38-72 of SEQ ID NO:38 (≙13-47 of bovine IF1 protein);
   [0816] SEQ ID NO:149 is of the same form but instead has residues 39-72 of SEQ ID NO:38 (≙14-47 of bovine IF1 protein);
   [0817] SEQ ID NO:150 is of the same form but instead has residues 67-83 of SEQ ID NO:38 (≙42-58 of bovine IF1 protein);
   [0818] wherein each of these sequences without its epitope tag and/or its CPP sequence component(s) (and/or wherein a different epitope/affinity tag and/or different CPP sequence is componentry to the sequence) is also contemplated, wherein some non-limiting examples are:
   [0819] sub-sequence/fragment of any of SEQ ID NO:146 to SEQ ID NO:150 without its first 14 residues (so without epitope/affinity tag), or without its first 36 residues (so without epitope/affinity tag and CPP sequence), or wherein its residues 15-36 are absent and so its 14^{th} residue is directly concatenated to its 37^{th} residue (so without CPP sequence);
   [0820] SEQ ID NO:151 to SEQ ID NO:155 are the same as SEQ ID NO:146 to SEQ ID NO:150 except that their Cell Penetrating Peptide (CPP) sequence component is different, being SEQ ID NO: 126; wherein a sub-sequence/fragment/truncation of any of SEQ ID NO:151 to SEQ ID NO:155 (e.g. without its first 14 residues [so without epitope/affinity tag]) is also contemplated;
   [0821] truncated sequences of any of SEQ ID NO:146 to SEQ ID NO:155 are contemplated; for non-limiting example: SEQ ID NO:y, where y is an integer selected from 146, 147, 151, 152, truncated at its C-terminal end by a number (integer) of residues selected from the numerical range 1 to 18, or where y is instead a number (integer) selected from 148, 149, 153, 154, truncated at its C-terminal end by a number (integer) of residues selected from the numerical range 1 to 6; in all these cases optionally with an additional truncation but at its N-terminal end e.g. a N-terminal truncation disclosed above [different values of y, and/or different number of residues truncated, are different embodiments].

[0822] SEQ ID NO:156 encompasses the human and mouse Mitochondrial Import Sequence (MIS) for their respective IF1 proteins.

[0823] SEQ ID NO:157 is SEQ ID NO:130 (example epitope tag) concatenated to SEQ ID NO:126 (example CPP sequence) concatenated to SEQ ID NO:156 concatenated to residues 26-85 of SEQ ID NO:43 (≙1-60 of bovine IF1 protein) [but a bit broader than SEQ ID NO:43 at its 81^{st} residue wherein Thr and Ser are permitted in addition to His and Ala]; SEQ ID NO:158 is the same but instead of residues 26-85, it has residues 35-85 of SEQ ID NO:43 (≙10-60 of bovine IF1 protein); SEQ ID NO:159 is of the same form but instead has residues 38-72 of SEQ ID NO:43 (≙14-60 of bovine IF1 protein).

[0824] SEQ ID NO:160 is SEQ ID NO:130 (example epitope tag) concatenated to SEQ ID NO:126 (example CPP sequence) concatenated to SEQ ID NO:156 concatenated to residues 39-72 of SEQ ID NO:45 (≙14-47 of bovine IF1 protein); SEQ ID NO:161 is the same but instead of residues 38-72, it has residues 67-83 of SEQ ID NO:45 (≙42-58 of bovine IF1 protein).

[0825] Truncated sequences thereof are contemplated: for non-limiting example: SEQ ID NO:157 or SEQ ID NO:158 truncated at its C-terminal end by a number (integer) of residues selected from the numerical range 1 to 18 (different integers in different embodiments), SEQ ID NO:45 truncated at its C-terminal end by a number (integer) of residues selected from the numerical range 1 to 6 (different integers in different embodiments), optionally with an additional truncation but at the N-terminal end e.g. as disclosed below.

[0826] Sub-sequence/fragment of any of SEQ ID NO:157 to SEQ ID NO:161, e.g. without its first 14 residues (so without epitope/affinity tag), or without its first 67 residues (so without epitope/affinity tag and CPP sequence), or wherein its residues 15-67 are absent and so its 14^{th} residue is directly concatenated to its 68^{th} residue (so without CPP sequence).

[0827] SEQ ID NO:162 and SEQ ID NO:163 are human and mouse Mitochondrial Import Sequence (MIS) for their respective IF1 proteins respectively.

[0828] SEQ ID NO:164 is an example Tat CPP sequence, with optional flanking glycine/proline residues (optionally contains one or more corresponding D-amino acids). SEQ ID NO:165 is an example poly-arginine CPP sequence, with optional flanking glycine/proline residues (optionally contains one or more corresponding D-amino acids). If it is selected to be just RRRRRRR [SEQ ID NO:455], this has the benefit that this CPP sequence has proven safe in a clinical stage drug candidate (discussed elsewhere herein), and if it is selected to be RRRRRRR [SEQ ID NO:455], RRRRRRRG [SEQ ID NO:461] or RRRRRRRP [residues 4-11 of SEQ ID NO:453], these all have the benefit of being present in naturally occurring human proteins (and some proteins in at least some other mammals), and so have low immunogenicity in humans (and in at least some other mammals).

[0829] SEQ ID NO:166 to SEQ ID NO:233 are each SEQ ID NO:130 (example epitope tag) concatenated to SEQ ID NO:164 (example CPP sequence) concatenated to SEQ ID NO:162 (human MIS) concatenated to a “mature” (without MIS) IF1 protein or fragment thereof (wherein some non-limiting key sequence variants are contemplated and encompassed),
[0830] which for SEQ ID NO:166 to SEQ ID NO:172 is bovine IF1 protein (or variant thereof) residues: 1-84, 1-60, 10-60, 14-60, 13-47, 14-47, 42-58 respectively,
[0831] which for SEQ ID NO:173 to SEQ ID NO:179 is human IF1 protein (or variant thereof) residues: 1-84, 1-60, 10-60, 14-60, 13-47, 14-47, 42-58 respectively,
[0832] which for SEQ ID NO:180 to SEQ ID NO:186 is bowhead whale IF1 protein (or variant thereof) residues: 1-84, 1-60, 10-60, 14-60, 13-47, 14-47, 42-58 respectively,
[0833] which for SEQ ID NO:187 to SEQ ID NO:192 is blue whale IF1 protein (or variant thereof) residues: 1-84, 1-60, 14-60, 13-47, 14-47, 42-58 respectively (10-60 accidentally omitted but is contemplated also),
[0834] which for SEQ ID NO:193 to SEQ ID NO:198 is fin whale IF1 protein (or variant thereof) residues: 1-84, 1-60, 10-60, 14-60, 13-47, 14-47, 42-58 respectively (10-60 accidentally omitted but is contemplated also),
[0835] which for SEQ ID NO:199 to SEQ ID NO:205 is Galápagos tortoise (Chelonoidis abingdonii) IF1 protein (or variant thereof) residues: 1-84, 1-60, 10-60, 14-60, 13-47, 14-47, 42-58 respectively,
[0836] which for SEQ ID NO:206 to SEQ ID NO:212 is eastern box turtle (Terrapene carolina triunguis) IF1 protein (or variant thereof) residues: 1-84, 1-60, 10-60, 14-60, 13-47, 14-47, 42-58 respectively,
[0837] which for SEQ ID NO:213 to SEQ ID NO:219 is naked mole rat IF1 protein (or variant thereof) residues: 1-84, 1-60, 10-60, 14-60, 13-47, 14-47, 42-58 respectively,
[0838] which for SEQ ID NO:220 to SEQ ID NO:226 is African bush elephant IF1 protein (or variant thereof) residues: 1-84, 1-60, 10-60, 14-60, 13-47, 14-47, 42-58 respectively, which for SEQ ID NO:227 to SEQ ID NO:233 is West Indian manatee IF1 protein (or variant thereof) residues: 1-84, 1-60, 10-60, 14-60, 13-47, 14-47, 42-58 respectively.

[0839] SEQ ID NO:234 to SEQ ID NO:301 are the same as SEQ ID NO:166 to SEQ ID NO:233 except that a different CPP is incorporated: SEQ ID NO:165 instead of SEQ ID NO:164. Any of the aforementioned sequences with a different Mitochondrial Import Sequence (MIS) is contemplated. For illustrative non-limiting example, SEQ ID NO:302 to SEQ ID NO:335 have the MIS of mouse, instead of human: SEQ ID NO: 163 instead of SEQ ID NO:162.

[0840] Any sub-sequence/fragment of any of SEQ ID NO:166 to SEQ ID NO:233, e.g. without its first 14 residues (so without epitope/affinity tag), or without its first 27 residues (so without epitope/affinity tag and CPP sequence), or wherein its residues 15-27 are absent and so its 14^{th} residue is directly concatenated to its 28^{th} residue (so without CPP sequence).

[0841] Any sub-sequence/fragment of any of SEQ ID NO:234 to SEQ ID NO:335, e.g. without its first (most N-terminal) 14 residues (so without epitope/affinity tag), or without its first 23 residues (so without epitope/affinity tag and CPP sequence), or wherein its residues 15-23 are absent and so its 14^{th} residue is directly concatenated to its 24^{th} residue (so without CPP sequence).

[0842] SEQ ID NO:y, where y is an integer selected from 166, 173, 180, 187, 193, 199, 206, 213, 220, 227, 234, 241, 248, 255, 261, 267, 274, 281, 288, 295, 302, 309, 316, 323, 329, truncated at its C-terminal end by a number (integer) of residues selected from the numerical range 1 to 45, or where y is instead an integer selected from 168, 169, 175, 176, 182, 183, 189, 195, 201, 202, 208, 209, 215, 216, 222, 223, 229, 230, 236, 237, 243, 244, 250, 251, 257, 263, 269, 270, 276, 277, 283, 284, 290, 291, 297, 298, 304, 305, 311, 312, 318, 319, 325, 331, 332, truncated at its C-terminal end by a number (integer) of residues selected from the numerical range 1 to 18, or where y is instead an integer selected from 170, 171, 177, 178, 184, 185, 190, 191, 196, 197, 203, 204, 210, 211, 217, 218, 224, 225, 231, 232, 238, 239, 245, 246, 252, 253, 258, 259, 264, 265, 270, 271, 278, 279, 285, 286, 292, 293, 299, 300, 306, 307, 313, 314, 320, 321, 326, 327, 333, 334, truncated at its C-terminal end by a number (integer) of residues selected from the numerical range 1 to 6; in all these cases optionally with an additional truncation but at its N-terminal end e.g. an aforementioned N-terminal truncation [different values of y, and/or different number of residues truncated, are different embodiments].

[0843] Aforementioned sequences with a different epitope/affinity tag and/or different Cell Penetrating Peptide (CPP) sequence and/or different Mitochondrial Import Sequence (MIS, wherein in some preferred embodiments the MIS is that which a species to be administered uses for its native IF1 protein) and/or different IF1 protein/fragment (or sequence variant thereof), wherein any IF1 protein is contemplated, or any fragment thereof, wherein IF1 protein/fragment (or sequence variant thereof) from a long-lived species (high maximal lifespan) is especially favoured, wherein any component(s) may be absent except the IF1 protein/fragment (or sequence variant thereof), optionally wherein all is absent except this.

### A General Non-Limiting Formula: N to C-Terminal:

### [Epitope/Affinity Tag (or Absent)]-[Cell Penetrating Peptide Sequence (or Absent)]-[Mitochondrial Import Sequence (or Absent)]-[IF1 Protein/Fragment or Sequence Variant Thereof (NEVER Absent)].

[0844] In sequences herein in which an epitope/affinity tag is concatenated to a Cell Penetrating Peptide (CPP) sequence, in alternative fusion protein embodiments (not shown), the CPP sequence is absent and the epitope/affinity tag is concatenated directly to the Mitochondrial Import Sequence (MIS) of the IF1 protein/fragment (or sequence variant thereof) containing fusion protein.

[0845] Disclosed herein are some illustrative non-limiting examples of epitope/affinity tags, CPP sequences, MIS sequences, IF1 proteins/fragments (and sequence variants thereof). From the teaching of this disclosure, one of the art knows how to assemble further sequences of this disclosure, which are not explicitly shown. To illustrate, SEQ ID NO:157 has a CPP component which is SEQ ID NO:126, but one of the art will see that this can be substituted with a different CPP sequence of the art to produce an alternative sequence of this disclosure, optionally with a different CPP sequence mentioned herein, e.g. SEQ ID NO:125.

[0846] Any sequence (or fragment/concatenated fragments thereof) of SEQ ID NO:166 to SEQ ID NO: 335 wherein its CPP component is substituted with a different CPP sequence (or multiple thereof), optionally selected from SEQ ID NO:124 to SEQ ID NO: 126 and/or from SEQ ID NO:440 to SEQ ID NO: 638.

[0847] Componentry to this disclosure is an IF1 protein, or fragment thereof, from one species attached to the C-terminal end of a Mitochondrial Import Sequence (MIS) from a different species, preferably the MIS that the species uses for its native IF1 protein.

[0848] For a concatenated sequence herein, every possible arrangement of its concatenated parts relative to one another is contemplated and componentry to this disclosure e.g. one or more concatenated parts incorporated in the opposite orientation than shown, and/or a different ordering of componentry concatenations, and/or wherein one or more of the concatenated sequences is absent. Componentry to this disclosure is SEQ ID NO:X (or fragment thereof, or concatenated fragments thereof) concatenated to SEQ ID NO:X (or fragment thereof, or concatenated fragments thereof) optionally, in turn, further concatenated to SEQ ID NO:X (or fragment thereof, or concatenated fragments thereof) optionally, in turn, further concatenated to SEQ ID NO:X (or fragment thereof, or concatenated fragments thereof) optionally, in turn, further concatenated to SEQ ID NO:X (or fragment thereof, or concatenated fragments thereof), wherein X can, independently selected in each case of using X, be 1, or the number of sequences in the Sequence Listing component to this application, or any integer between 1 and the total number of sequences in the Sequence Listing component to this application (wherein each componentry sequence can be in either orientation). Concatenated sequences of this disclosure are themselves sequences of this disclosure, optionally wherein up to ten (or five, or four) sequences are concatenated.

[0849] In some embodiments, an amino acid/peptide/protein sequence herein is substituted for a polynucleotide sequence coding for it, which can in turn be concatenated/bound to other (amino acid/polynucleotide) sequence(s) herein e.g. it is within the scope of this disclosure to have a polynucleotide sequence, encoding at least one IF1 protein/fragment (or sequence variant thereof), combined/conjoined (e.g. covalently bound) with at least one Cell Penetrating Peptide (CPP) amino acid sequence (or multiple thereof).

[0850] Incidentally, SEQ ID NO:336 is the IF1 protein, with its N-terminal MIS, of bowhead whale (Balaena mysticetus). SEQ ID NO:336 is the IF1 protein, with its N-terminal Mitochondrial Import Sequence [MIS], of blue whale (Balaenoptera musculus). These sequences have never been reported before. These protein sequences and nucleotide sequences that code for them are componentry to this disclosure (optionally isolated/produced/purified/substantially purified/partially purified).

### More Non-Limiting IF1 Protein Sub-Sequences/Fragments:

[0851] Some preferred embodiments of this disclosure are (and further embodiments are the use thereof, for at least one use disclosed herein), wherein the IF1 protein referred to below can be at least one IF1 protein sequence variant, e.g. one or more disclosed herein, or any naturally occurring IF1 protein(s), from any species, wherein in some embodiments the IF1 protein is from a mammal such as (without limitation) a cow, rat, mouse, rodent, naked mole rat, primate, human, wherein in some preferred embodiments it is from a large/long-lifespan/long-lifespan for its size/thermoconformer/cold-blooded species, and/or a species that has negligible senescence, and/or from a species with a longer maximal/typical lifespan than the species that the IF1 protein/fragment (or sequence variant thereof) is being administered to:
[0852] Protein comprising (or consisting of) one or more of residues
[0853] 14-47, 13-47, 12-47, 11-47, 10-47, 9-47, 8-47, 7-47, 6-47, 5-47, 4-47, 3-47, 2-47, 1-47, 14-48, 14-46, 14-45, 14-44, 14-43, 14-42, 13-48, 13-46, 13-45, 13-44, 13-43, 13-42, 12-48, 12-46, 12-45, 12-44, 12-43, 12-42, 11-48, 11-46, 11-45, 11-44, 11-43, 11-42, 10-48, 10-46, 10-45, 10-44, 10-43, 10-42, 42-58, 42-59, 1-56, 1-57, 1-58, 1-59, 1-60, 10-56, 10-57, 10-58, 10-59, 10-60, 10-84, 14-84, 14-60, 18-84, 10-50, 1-45, 42-56, 42-47, 48-56, 49-55 of a “mature” IF1 protein;
[0854] Fusion protein comprising (or consisting of) a Mitochondrial Import Sequence (MIS) concatenated to one or more of residues
[0855] 14-47, 13-47, 12-47, 11-47, 10-47, 9-47, 8-47, 7-47, 6-47, 5-47, 4-47, 3-47, 2-47, 1-47, 14-48, 14-46, 14-45, 14-44, 14-43, 14-42, 13-48, 13-46, 13-45, 13-44, 13-43, 13-42, 12-48, 12-46, 12-45, 12-44, 12-43, 12-42, 11-48, 11-46, 11-45, 11-44, 11-43, 11-42, 10-48, 10-46, 10-45, 10-44, 10-43, 10-42, 42-58, 42-59, 1-56, 1-57, 1-58, 1-59, 1-60, 10-56, 10-57, 10-58, 10-59, 10-60, 10-84, 14-84, 14-60, 18-84, 10-50, 1-45, 42-56, 42-47, 48-56, 49-55 of a “mature” IF1 protein;
[0856] Fusion protein comprising (or consisting of) CPP sequence concatenated to Mitochondrial Import Sequence (MIS) concatenated to one or more of residues
[0857] 14-47, 13-47, 12-47, 11-47, 10-47, 9-47, 8-47, 7-47, 6-47, 5-47, 4-47, 3-47, 2-47, 1-47, 14-48, 14-46, 14-45, 14-44, 14-43, 14-42, 13-48, 13-46, 13-45, 13-44, 13-43, 13-42, 12-48, 12-46, 12-45, 12-44, 12-43, 12-42, 11-48, 11-46, 11-45, 11-44, 11-43, 11-42, 10-48, 10-46, 10-45, 10-44, 10-43, 10-42, 42-58, 42-59, 1-56, 1-57, 1-58, 1-59, 1-60, 10-56, 10-57, 10-58, 10-59, 10-60, 10-84, 14-84, 14-60, 18-84, 10-50, 1-45, 42-56, 42-47, 48-56, 49-55 of a “mature” IF1 protein;
[0858] Fusion protein comprising (or consisting of) epitope/affinity tag sequence concatenated to CPP sequence concatenated to Mitochondrial Import Sequence (MIS) concatenated to one or more of residues
[0859] 14-47, 13-47, 12-47, 11-47, 10-47, 9-47, 8-47, 7-47, 6-47, 5-47, 4-47, 3-47, 2-47, 1-47, 14-48, 14-46, 14-45, 14-44, 14-43, 14-42, 13-48, 13-46, 13-45, 13-44, 13-43, 13-42, 12-48, 12-46, 12-45, 12-44, 12-43, 12-42, 11-48, 11-46, 11-45, 11-44, 11-43, 11-42, 10-48, 10-46, 10-45, 10-44, 10-43, 10-42, 42-58, 42-59, 1-56, 1-57, 1-58, 1-59, 1-60, 10-56, 10-57, 10-58, 10-59, 10-60, 10-84, 14-84, 14-60, 18-84, 10-50, 1-45, 42-56, 42-47, 48-56, 49-55 of a “mature” IF1 protein.

[0860] This is illustrated herein using IF1 protein from some species, but in different embodiments, a different IF1 protein from a different species (or sequence variant thereof) is selected instead, and the equivalent sub-sequences, concatenated sub-sequences and fusion proteins (and their use thereof, for at least one use disclosed herein) are componentry to this disclosure.

Other IF1 Proteins/Fragments, from Other Species, and Fusion Proteins Thereof

[0861] With the teaching of this disclosure in hand, for example seeing the form of sequences in its Sequence Listing component, other peptide/protein sequences of this disclosure (and coding polynucleotides thereof, and vectors, cells, gene therapies, transgenic organisms thereof; and use of one or more thereof [for at least one use disclosed herein]), not explicitly stated in this disclosure, will be apparent to one of the art e.g, wherein an IF1 protein/fragment (or sequence variant thereof) from a different, unmentioned species is utilized instead, optionally a fusion protein thereof. Some further IF1 protein sequences are presented in FIG. 10 herein. More IF1 protein sequences can be sourced from InterPro family “Mitochondrial ATPase inhibitor (IPR007648)” and/or Pfam family “IATP (PF04568)”. Wherein given the teaching of this disclosure, one of the art can see how to utilize these extra IF1 protein sequences to arrive at further sequences of this disclosure. Innovatively, IF1 protein sequence(s) from one or more long-lived species (either absolutely and/or for its size) is favoured. Some notable embodiments (with maximal lifespan in brackets, if value is available in AnAge online database [AnAge Database of Animal Ageing and Longevity [115]]) utilize an IF1 protein/fragment (or sequence variant thereof) from one or more of a whale species, long-lived mammal species, species with a high maximal lifespan (e.g. as reported by AnAge online database), North Atlantic right whale (67), North Pacific right whale, Southern right whale (70), Greenland shark (392), Rougheye rockfish (205), Tiger rockfish (116), Orange roughy (149), Atlantic sturgeon (60), Tuatara (90), Olm/European cave salamander (102), Eurasian eagle-owl (68), Pink cockatoo (83), Asiatic elephant (66), Hippopotamus (61), Black rhinoceros (49), African Cape buffalo (33), Desert tortoise (63).

[0862] A method of this disclosure is to assemble a Markush type scheme encompassing different IF1 proteins from different species, aligned by features of their “pH dependence motif”, wherein this method has been illustrated herein; optionally/preferably/exclusively encompassing some IF1 proteins from some long-lived species, with a high maximal lifespan for their size and/or [more preferred] in absolute terms; and extracting one or more novel IF1 protein sequence variants, and/or one or more fragments thereof, from within its encompassed sequence space, wherein each novel sequence outputted by this method is componentry to this disclosure, as is its use thereof, for at least one use disclosed herein.

### Rehash

[0863] Any peptide/protein/amino acid sequence of/in this disclosure concatenated at either end, optionally via a linker sequence (e.g. by one or more glycine and/or proline residues, which confers flexibility), to a Mitochondrial Import Sequence (MIS) is componentry to this disclosure, as is its use thereof (for at least one use disclosed herein), wherein preferably such a sequence only has a single componentry MIS sequence.

[0864] Any peptide/protein/amino acid sequence of/in this disclosure concatenated at either end, optionally via a linker sequence (e.g. by one or more glycine and/or proline residues, which confers flexibility), to a Cell Penetrating Peptide (CPP) sequence of the art, and/or a Mitochondria Penetrating Peptide (MPP) sequence of the art, in either orientation (N to C, C to N), is componentry to this disclosure, as is its use thereof (for at least one use disclosed herein), wherein preferably (but not restrictively) such a sequence only has a single componentry CPP or MPP sequence.

[0865] Any amino acid sequence of/in this disclosure concatenated at either end, optionally via a linker sequence (e.g. by one or more glycine and/or proline residues, which confers flexibility, e.g. by a cleavable linker sequence, e.g. by a protease cleavable linker or other type of cleavable linker of the art e.g. those cleavable by a small molecule [s]), to an epitope/affinity tag sequence (many known to those of the art), in either orientation, is componentry to this disclosure, as is its use thereof (for at least one use disclosed herein), wherein preferably such a sequence only has a single epitope/affinity tag.

### A Quick Important Point on Scope

[0866] 14-47 is NOT the only favoured IF1 protein fragment. Herein, 14-47 is cited/used often as an exemplary IF1 protein fragment. Herein, at every point that a 14-47 IF1 protein fragment is referred to/shown, in alternative embodiments, a different IF1 protein fragment (optionally from same species/group of species as the context, or a different species/group of species as the context, or any species) is substituted in its place, for non-limiting example, selected from the group comprising: 42-58, 1-56, 1-60, 10-56, 10-60, 1-58, 10-58, 10-84 (or 42-56 or 42-47). IF1 protein fragment 10-60 is particularly prized, and for every fusion protein herein that comprises a 14-47 IF1 protein fragment, in alternative embodiments this 14-47 component is substituted with the 10-60 equivalent.

[0867] Sequences herein that have ≙K49 (using “mature” [without MIS] IF1 protein numbering), incidentally which is the result of H49K substitution from an IF1 protein/fragment sequence, in alternative sequences embodiments (not shown) this residue is alanine or arginine (≙49 or R49) instead; for example this can be applied to some sequences within FIG. 10.

### Some Retroinverse (Retro-Inverse) Embodiments

[0868] For a sequence of L-amino acids, its retroinverse/retro-inverse sequence is this sequence in reverse, wherein all the amino acids are D-amino acids. So, it is a sequence reversed with chirality inverted. A retroinverse sequence is more resistant to proteases, and so has a longer half-life in blood. A partially/completely retroinverse sequence of an amino acid/peptide/protein sequence of/in this disclosure is, in turn, a sequence of this disclosure. The retroinverse sequence of SEQ ID NO:X (or a fragment thereof, or concatenated fragments thereof), or partially retroinverse sequence of SEQ ID NO:X (or a fragment thereof, or concatenated fragments thereof) wherein only part(s) of it is retroinverse, wherein X can be 1, or the number of sequences in the Sequence Listing component to this application, or any integer between 1 and the total number of sequences in the Sequence Listing component to this application.

[0869] In some embodiments, all the sequence is retroinverse, or a different pattern of retroinverse part(s) applies.

[0870] A peptide/protein comprising (or consisting of) at least one partially/completely retroinverse sequence of an IF1 protein/fragment (or sequence variant thereof) (wherein any IF1 protein, from any species, is contemplated).

[0871] Contemplated is the retroinverse sequence of a fusion protein sequence comprising (or consisting of): Cell Penetrating Peptide sequence (or absent)]−[Mitochondrial Import Sequence (or absent)]−[IF1 protein/fragment or sequence variant thereof (NEVER absent)]. Or wherein the CPP component (if present) is retroinverse (partially or, more preferably, completely), the MIS component (if present) is not, and the IF1 protein/fragment (or sequence variant thereof) is retroinverse (partially or, more preferably, completely).

[0872] The retroinverse sequence of the following sequence: first 25 residues (or other residues range) of SEQ ID NO: f concatenated to SEQ ID NO:e (or a sub-sequence thereof, or concatenated sub-sequences thereof), wherein f is an integer selected from the range 1-123 (or the more preferred range 5-123), and wherein e is an integer selected from the range 1-123 (or the more preferred range 5-123); optionally wherein SEQ ID NO:q (or a sub-sequence thereof, or concatenated sub-sequences thereof) is concatenated to the N-terminal end of SEQ ID NO:f in this fusion protein, wherein q is an integer selected from the range 124-126 (or from the range 440-638), [different values of f and/or e and/or q are different embodiments; within their aforementioned range constraints, all possible combinations of f, e, q integer values are contemplated]; optionally/preferably wherein the SEQ ID NO:e component is a fragment thereof, optionally/preferably being one of its following fragments (different fragments in different embodiments): its residues: u−o, wherein u is equal to or an integer greater than 26, o is equal to or an integer less than its total number of residues, and u<o, wherein to illustrate with some non-limiting examples: residues: 26-109, 27-109, 28-109, 29-109, 30-109, 31-109, 32-109, 33-109, 34-109, 35-109, 36-109, 37-109, 38-109, 39-109, 40-109, 41-109, 42-109, 43-109, 44-109, 45-109, 46-109, 47-109, 48-109, 49-109, 50-109, 51-109, 52-109, 53-109, 54-109, 55-109, 56-109, 57-109, 58-109, 59-109, 60-109, 61-109, 62-109, 63-109, 64-109, 65-109, 66-109, 67-109, 68-109, 69-109, 70-109, 71-109, 72-109, 73-109, 74-109, 75-109, 76-109, 77-109, 78-109, 79-109, 80-109, 81-109, 82-109, 83-109, 84-109, 85-109, 86-109, 87-109, 88-109, 89-109, 90-109, 91-109, 92-109, 93-109, 94-109, 95-109, 96-109, 97-109, 98-109, 99-109, 100-109, 101-109, 102-109, 103-109, 104-109, 105-109, 106-109, 107-109, 108-109, and, for each aforementioned fragment, all possible fragments thereof (e.g. truncated at C-terminus by a number of residues) are also contemplated,
[0873] wherein to illustrate with some non-limiting examples: residues: 26-85, 35-85, 35-72, 38-72, 39-72, 39-71, 39-70, 39-69, 39-68, 39-67, 67-83, 73-81, 74-80 (≙1-60, 10-60, 10-47, 13-47, 14-47, 14-46, 14-45, 14-44, 14-43, 14-42, 42-58, 48-56, 49-55 of bovine IF1 protein),
   [0874] wherein to illustrate with some non-limiting examples: SEQ ID NO:338 to SEQ ID NO:353 are each the retroinverse sequence of the sequence: SEQ ID NO:164 (example CPP sequence) concatenated to SEQ ID NO:162 (human MIS) concatenated to a “mature” (without MIS) IF1 protein or fragment thereof (wherein some non-limiting key sequence variants are contemplated and encompassed),
   [0875] which for SEQ ID NO:338 to SEQ ID NO:341 is bovine IF1 protein (or variant thereof) residues: 10-60, 14-60, 14-47, 42-58 respectively,
   [0876] which for SEQ ID NO:342 to SEQ ID NO:345 is human IF1 protein (or variant thereof) residues: 10-60, 14-60, 14-47, 42-58 respectively,
   [0877] which for SEQ ID NO:346 to SEQ ID NO:349 is bowhead whale IF1 protein (or variant thereof) residues: 10-60, 14-60, 14-47, 42-58 respectively,
   [0878] which for SEQ ID NO:350 to SEQ ID NO:353 is blue whale IF1 protein (or variant thereof) residues: 10-60, 14-60, 14-47, 42-58 respectively.
[0879] SEQ ID NO:354 to SEQ ID NO:369 are the same as SEQ ID NO:338 to SEQ ID NO:353 except that a different CPP is incorporated (SEQ ID NO:165 instead of SEQ ID NO:164). SEQ ID NO:370 to SEQ ID NO: 373 are of the same form, using SEQ ID NO:165 as the CPP component, and an IF1 protein fragment from naked mole rat. Any of the aforementioned sequences with a different Mitochondrial Import Sequence (MIS) is contemplated. For illustrative non-limiting example, SEQ ID NO:374 to SEQ ID NO:393 are the same as SEQ ID NO:354 to SEQ ID NO:373 except they have the MIS of mouse, instead of human: SEQ ID NO:163 instead of SEQ ID NO:162.

[0880] Truncated forms/fragments of these sequences are contemplated. For non-limiting example, any of SEQ ID NO:338 to SEQ ID NO:353 without its last (most C-terminal) 13 residues (i.e. without its CPP component, without its SEQ ID NO:164 component), or any of SEQ ID NO:354 to SEQ ID NO:373 without its last (most C-terminal) 9 residues (i.e. without its CPP component, without its SEQ ID NO:165 component). SEQ ID NO:y, where y is an integer selected from 338, 339, 342, 343, 346, 347, 351, 352, 354, 355, 358, 359, 362, 363, 366, 367, 370, 371, 374, 375, 378, 379, 382, 383, 386, 387, 390, 391, truncated at its N-terminal end by a number (integer) of residues selected from the numerical range 1 to 18, or where y is instead an integer selected from 340, 344, 348, 352, 356, 360, 364, 368, 372, 376, 380, 384, 388, 392, truncated at its N-terminal end by a number (integer) of residues selected from the numerical range 1 to 6, optionally with an additional truncation but at its C-terminal end e.g. an aforementioned C-terminal truncation [different values of y, and/or different number of residues truncated, are different embodiments].

[0881] As an alternative to the above, the following sequence: N to C-terminal order: first 25 residues (or other residues range) of SEQ ID NO:f (normal or partially/completely retroinverse sequence thereof) concatenated to normal or partially/completely retroinverse sequence of SEQ ID NO:e (or a sub-sequence thereof, or concatenated sub-sequences thereof), wherein f is an integer selected from the range 1-123 (or the more preferred range 5-123), and wherein e is an integer selected from the range 1-123 (or the more preferred range 5-123); optionally wherein normal or partially/completely retroinverse sequence of SEQ ID NO:q (or a sub-sequence thereof, or concatenated sub-sequences thereof) is concatenated to the N-terminal end of SEQ ID NO:f in this fusion protein, wherein q is an integer selected from the range 124-126 (or from the range 440-638), [different values of f and/or e and/or q are different embodiments; within their aforementioned range constraints, all possible combinations of f, e, q integer values are contemplated]; optionally/preferably wherein the SEQ ID NO:e component is a fragment thereof, optionally/preferably being one of its following fragments (different fragments in different embodiments): its residues: u−o, wherein u is equal to or an integer greater than 26, o is equal to or an integer less than its total number of residues, and u<o, wherein to illustrate with some non-limiting examples: residues: 26-109, 27-109, 28-109, 29-109, 30-109, 31-109, 32-109, 33-109, 34-109, 35-109, 36-109, 37-109, 38-109, 39-109, 40-109, 41-109, 42-109, 43-109, 44-109, 45-109, 46-109, 47-109, 48-109, 49-109, 50-109, 51-109, 52-109, 53-109, 54-109, 55-109, 56-109, 57-109, 58-109, 59-109, 60-109, 61-109, 62-109, 63-109, 64-109, 65-109, 66-109, 67-109, 68-109, 69-109, 70-109, 71-109, 72-109, 73-109, 74-109, 75-109, 76-109, 77-109, 78-109, 79-109, 80-109, 81-109, 82-109, 83-109, 84-109, 85-109, 86-109, 87-109, 88-109, 89-109, 90-109, 91-109, 92-109, 93-109, 94-109, 95-109, 96-109, 97-109, 98-109, 99-109, 100-109, 101-109, 102-109, 103-109, 104-109, 105-109, 106-109, 107-109, 108-109, and, for each aforementioned fragment, all possible fragments thereof are also contemplated (e.g. truncated at the C-terminus by a number of residues),
[0882] wherein to illustrate with some non-limiting examples: residues: 26-85, 35-85, 35-72, 38-72, 39-72, 39-71, 39-70, 39-69, 39-68, 39-67, 67-83, 73-81, 74-80 (+1-60, 10-60, 10-47, 13-47, 14-47, 14-46, 14-45, 14-44, 14-43, 14-42, 42-58, 48-56, 49-55 of bovine IF1 protein),
[0883] wherein to illustrate with some non-limiting examples: SEQ ID NO:394 to SEQ ID NO:406 each have the retroinverse sequence of SEQ ID NO:164 (example CPP sequence) concatenated to SEQ ID NO:162 (human MIS, NOT retroinverse) concatenated to the retroinverse sequence of a “mature” (without MIS) IF1 protein or fragment thereof (wherein some non-limiting key sequence variants are contemplated and encompassed),
[0884] which for SEQ ID NO:394 to SEQ ID NO:396 is bovine IF1 protein (or variant thereof) residues: 10-60, 14-47, 42-58 respectively (14-60 also contemplated but not shown),
[0885] which for SEQ ID NO:397 to SEQ ID NO:399 is human IF1 protein (or variant thereof) residues: 10-60, 14-47, 42-58 respectively (14-60 also contemplated but not shown),
[0886] which for SEQ ID NO:400 to SEQ ID NO:402 is bowhead whale IF1 protein (or variant thereof) residues: 10-60, 14-47, 42-58 respectively (14-60 also contemplated but not shown),
[0887] which for SEQ ID NO:403 to SEQ ID NO:406 is blue whale IF1 protein (or variant thereof) residues: 10-60, 14-60, 14-47, 42-58 respectively.

[0888] SEQ ID NO:407 to SEQ ID NO:419 are the same as SEQ ID NO:394 to SEQ ID NO:406 except that a different CPP is incorporated (SEQ ID NO:165 instead of SEQ ID NO:164). SEQ ID NO:420 to SEQ ID NO:422 are of the same form, using SEQ ID NO:165 as the CPP component, and an IF1 protein fragment from naked mole rat. Any of the aforementioned sequences with a different Mitochondrial Import Sequence (MIS) is contemplated. For illustrative non-limiting example, SEQ ID NO:423 to SEQ ID NO:438 are the same as SEQ ID NO:407 to SEQ ID NO:422 except they have the MIS of mouse, instead of human: SEQ ID NO:163 instead of SEQ ID NO:162.

[0889] Truncated forms/fragments of these sequences are contemplated. For non-limiting example, any of SEQ ID NO:394 to SEQ ID NO:406 without its first 13 residues (i.e. without its CPP component, without its SEQ ID NO:164 component), or any of SEQ ID NO:407 to SEQ ID NO:422 without its first 9 residues (i.e. without its CPP component, without its SEQ ID NO:165 component). SEQ ID NO:y, where y is an integer selected from 394, 397, 400, 403, 404, 407, 410, 413, 416, 417, 420, 423, 426, 429, 432, 433, 436, with a number (integer) of residues, selected from the numerical range 1 to 18, deleted within the residue range 39 to 56, or where y is instead an integer selected from 395, 398, 401, 405, 408, 411, 414, 418, 421, 424, 427, 430, 434, 437, with a number (integer) of residues, selected from the numerical range 1 to 6, deleted within the residue range 39 to 44, optionally with an additional truncation but at its N-terminal end e.g. an aforementioned N-terminal truncation [different values of y, and/or different number of residues truncated, are different embodiments].

[0890] Any sequence (or fragment/concatenated fragments thereof) of SEQ ID NO:338 to SEQ ID NO:438 wherein its CPP component is substituted with a different CPP sequence (or multiple thereof), optionally selected from SEQ ID NO:124 to SEQ ID NO:126, and/or from SEQ ID NO:440 to SEQ ID NO:638, or the retroinverse (partially/completely) thereof.

### Some Esterified Embodiments

[0891] A peptide/protein comprising (or consisting of) at least one IF1 protein/fragment (or sequence variant thereof) with one or more of its carboxyl groups esterified (wherein any IF1 protein, from any species, is contemplated).

[0892] In some embodiments, SEQ ID NO:X (or fragment thereof, or concatenated fragments thereof) has one or more of its carboxyl groups esterified, wherein X can be 1, or the number of sequences in the Sequence Listing component to this application, or any integer between 1 and the total number of sequences in the Sequence Listing component to this application.

[0893] To illustrate with a non-limiting example (presented here and not in the Sequence Listing because esterification of a carboxyl group(s) cannot be represented within the WIPO ST.25 standard): Human Mitochondrial Import Sequence (MIS, for IF1 protein) concatenated to (using “mature” {without MIS} human IF1 protein numbering) residues 14-47 of human IF1 protein, which has an S14A substitution, with the option of zero or more of its carboxyl groups esterified:

[chemical structure]

wherein R¹ is selected (independently selected at each incidence of R1) from oxygen (O) or

[chemical structure]

or a different group used to esterify (esterification) a carboxyl group(s) in one or more of U.S. Pat. Nos. 9,790,483B2, 10,258,695B2, 10,428,323B2, 10,577,303B1, US2020/0032238A1, [193-194].

[0894] Below is as immediately above, but, wherein the IF1 protein 14-47 residues component is retroinverse/retro-inverse (reverse sequence, opposite chirality):

[chemical structure]

wherein R1 is (independently at each incidence) as defined earlier in this section (under the present heading). In alternative embodiments (not shown) the sequence is all retroinverse (i.e. MIS component as well), or a different sequence section(s) is selected to be retroinverse, and/or a MIS from a different species is used instead (e.g. from mouse) and/or the 14-47 IF1 protein component is from a different species instead (e.g. bowhead or blue or fin whale), wherein optionally, if the 14^{th} residue isn't already alanine, it is substituted to be so, optionally wherein 42-58 (or 1-60 or 10-60) IF1 protein residues are used instead of 14-47, wherein with all these aforementioned options, esterification of zero or more of their carboxyl groups is contemplated (wherein, in preferred embodiments, this can facilitate passage across biological membrane(s), conferring cellular penetration, wherein the ester bond joined moiety, or plurality thereof, is cleaved off by intracellular esterases once inside the cell). Esterification of a peptide/protein can negate its need for fusion of a Cell Penetrating Peptide (CPP) to enter a cell. Herein, where a peptide/protein sequence is presented with a CPP component(s), in alternative embodiments, this CPP component(s) is absent and the peptide/protein is esterified at one or more of its carboxyl groups. In other embodiments, the CPP component(s) remains present and the peptide/protein is esterified at one or more of its carboxyl groups, further ensuring that this peptide/protein can enter the cell. An amino acid/peptide/protein sequence of/in this disclosure which is esterified at one more of its carboxyl groups is componentry to this disclosure.
Modification of N- and/or C-Terminal Ends, and/or Esterified

[0895] A peptide/protein comprising (or consisting of) at least one IF1 protein/fragment (or sequence variant thereof) which is modified at its N- and/or C-terminal ends, optionally wherein a lipidic/lipid (e.g. fatty acid) moiety is conjugated/acylated to the N-terminus, and/or with one or more of its carboxyl groups esterified (wherein any IF1 protein, from any species, is contemplated).

[0896] A protein comprising (or consisting of) at least one IF1 protein/fragment (or sequence variant thereof) with at least one conjugated/covalently bound lipidic/lipid (e.g. fatty acid) moiety, and/or with one or more of its carboxyl groups esterified (wherein any IF1 protein, from any species, is contemplated). In some embodiments, SEQ ID NO:X (or fragment thereof, or concatenated fragments thereof) is modified at its N- and/or C-terminal ends (e.g. amidation/esterification of the C-terminus, and/or acylation [e.g. acetylation] of the N-terminus [e.g. fatty acid {or derivative thereof} conjugated/acylated to N-terminus, optionally/preferably wherein the fatty acid moiety comprises/contains between 2 to 100 {or 2 to 25} carbon atoms, optionally being a myristoyl/palmitoyl/stearoyl group]) and/or is esterified (e.g. with a group[s] for esterification disclosed herein) at one or more of its carboxyl groups, wherein X can be 1, or the number of sequences in the Sequence Listing component to this application, or any integer between 1 and the total number of sequences in the Sequence Listing component to this application;
[0897] in some particular embodiments, fragment of SEQ ID NO:X is SEQ ID NO:X without its (if applicable) epitope/affinity tag component and/or (if applicable) Cell Penetrating Peptide (CPP) sequence component;
[0898] in some particular embodiments, fragment of SEQ ID NO:X is SEQ ID NO:X without its (if applicable) epitope/affinity tag component, and a fatty acid moiety (non-limiting e.g. myristoyl/palmitoyl/stearoyl group) is acylated to its N-terminus, wherein a Cell Penetrating Peptide (CPP) sequence is the most N-terminal component.

[0899] First 25 residues (or other residues range) of SEQ ID NO:f (or partially/completely retroinverse sequence thereof) concatenated to SEQ ID NO:e (or a sub-sequence thereof, or concatenated sub-sequences thereof; optionally partially/completely retroinverse), wherein f is an integer selected from the range 1-123 (or the more preferred range 5-123), and wherein e is an integer selected from the range 1-123 (or the more preferred range 5-123); optionally wherein SEQ ID NO:q (or a sub-sequence thereof, or concatenated sub-sequences thereof; optionally partially/completely retroinverse) is concatenated to the N-terminal end of SEQ ID NO:f in this fusion protein, wherein q is an integer selected from the range 124-126 (or from the range 440-638), [different values of f and/or e and/or q are different embodiments; within their aforementioned range constraints, all possible combinations of f, e, q integer values are contemplated]; wherein a lipidic/lipid (e.g. fatty acid or derivative thereof) moiety is acylated to the N-terminal end of this fusion protein (optionally/preferably wherein the fatty acid moiety comprises/contains between 2 to 100 {or 2 to 25} carbon atoms, optionally being a myristoyl/palmitoyl/stearoyl group) and/or one or more of its carboxyl groups are esterified (e.g. with a group[s] for esterification disclosed herein);
[0900] optionally/preferably wherein the SEQ ID NO:e component is a fragment thereof, optionally/preferably being one of its following fragments (different fragments in different embodiments): its residues: u−o, wherein u is equal to or an integer greater than 26, o is equal to or an integer less than its total number of residues, and u>o, wherein to illustrate with some non-limiting examples: residues: 26-109, 27-109, 28-109, 29-109, 30-109, 31-109, 32-109, 33-109, 34-109, 35-109, 36-109, 37-109, 38-109, 39-109, 40-109, 41-109, 42-109, 43-109, 44-109, 45-109, 46-109, 47-109, 48-109, 49-109, 50-109, 51-109, 52-109, 53-109, 54-109, 55-109, 56-109, 57-109, 58-109, 59-109, 60-109, 61-109, 62-109, 63-109, 64-109, 65-109, 66-109, 67-109, 68-109, 69-109, 70-109, 71-109, 72-109, 73-109, 74-109, 75-109, 76-109, 77-109, 78-109, 79-109, 80-109, 81-109, 82-109, 83-109, 84-109, 85-109, 86-109, 87-109, 88-109, 89-109, 90-109, 91-109, 92-109, 93-109, 94-109, 95-109, 96-109, 97-109, 98-109, 99-109, 100-109, 101-109, 102-109, 103-109, 104-109, 105-109, 106-109, 107-109, 108-109, and, for each aforementioned fragment, all possible fragments thereof are also contemplated (e.g. truncated at the C-terminus by a number of residues),
[0901] wherein to illustrate with some non-limiting examples: residues: 26-85, 35-85, 35-72, 38-72, 39-72, 39-71, 39-70, 39-69, 39-68, 39-67, 67-83, 73-81, 74-80 (+1-60, 10-60, 10-47, 13-47, 14-47, 14-46, 14-45, 14-44, 14-43, 14-42, 42-58, 48-56, 49-55 of bovine IF1 protein),
   [0902] wherein to illustrate with some particular non-limiting examples: (wherein each of the following can optionally be esterified at one or more of their carboxyl groups):
   [0903] any of SEQ ID NO:127 to SEQ ID NO:129, or any of SEQ ID NO:394 to SEQ ID NO:438 or [wherein each of the following are without their first 14 residues (so without epitope/affinity tag)] any of SEQ ID NO:146 to SEQ ID NO:155, or any of SEQ ID NO:157 to SEQ ID NO:161, or any of SEQ ID NO:166 to SEQ ID NO:335, wherein a fatty acid (or derivative thereof) moiety is acylated to the N-terminal end of the protein (optionally/preferably wherein the fatty acid moiety comprises/contains between 2 to 100 {or 2 to 25} carbon atoms, optionally being a myristoyl/palmitoyl/stearoyl group);
   [0904] where the sequence is completely retroinverse, such that the Cell Penetrating Peptide (CPP) sequence is at the C-instead of the N-terminal end, such as with (for example) SEQ ID NO:338 to SEQ ID NO:393, a fatty amine (or derivative thereof) moiety (e.g. decylamine, CAS: 2016-57-1) is conjugated to the C-terminal end of the peptide/protein instead (Peptide-COOH+NH₂-CₙH₂ₙ₊₁=Peptide-CONH—CₙH₂ₙ₊₁).

### Hydrophobic Amino Acid Residue(s) Added “Upstream” of (N-Terminal to) MIS

[0905] In some embodiments, a fusion protein comprises (or consists of): presented in N to C-order: [one or more hydrophobic amino acids, optionally up to 50, preferably less than 20]-[MIS]-[IF1 protein/fragment (or sequence variant thereof)], optionally/preferably wherein one or more of this fusion protein's carboxyl groups are esterified (e.g. with a group[s] for esterification disclosed herein), optionally/preferably wherein one or more parts (or sub-part(s) thereof) are retroinverse (optionally/preferably wherein the MIS component isn't), preferably wherein each of the N-terminal section hydrophobic amino acid(s) have a hydrophobicity equal to, or greater than, phenylalanine, even more preferably with a hydrophobicity equal to, or greater than, cyclohexylalanine, optionally comprising either/both of these amino acids, wherein one or more of the added hydrophobic residues may be non-natural (i.e. not coded for by the genetic code). Optionally, the added hydrophobic amino acid(s) can be independently selected from the group consisting of (wherein for each, if applicable, both the L- and D-forms are contemplated as separate embodiments, even if not explicitly shown) L-phenylalanine, D-phenylalanine, L-tryptophan, D-tryptophan, L-phenylglycine, D-phenylglycine, 3,3-diphenyl-L-alanine, 3,3-diphenyl-D-alanine, L-3-cyclohexylalanine, D-3-cyclohexylalanine, L-3-(1-naphthyl) alanine, D-3-(1-naphthyl) alanine, L-3-(2-naphthyl) alanine, D-3-(2-naphthyl) alanine, L-2-aminooctanoic acid, D-2-aminooctanoic acid, O-Methyl-L-tyrosine, O-Methyl-D-tyrosine, 2,6-dimethyl-L-tyrosine, 2,6-dimethyl-D-tyrosine, L-2,4,6-trimethylphenylalanine, D-2,4,6-trimethylphenylalanine, 2-cyclohexyl-L-glycine, 2-cyclohexyl-D-glycine, 3-benzo[b]thiophen-3-yl-L-alanine, 3-benzo[b]thiophen-3-yl-D-alanine, L-homophenylalanine, D-homophenylalanine, 4-fluoro-L-phenylalanine, 4-fluoro-D-phenylalanine, 4-chloro-L-phenylalanine, 4-chloro-D-phenylalanine, 3,4-difluoro-L-phenylalanine, 3,4-difluoro-D-phenylalanine, wherein all the options can optionally have 1 to 4 substituents, independently selected from alkyl and halogen. In alternative embodiments, in addition, more types of hydrophobic amino acid can also be selected from. For example, other amino acids with one or more of cyclo, diphenyl, naphthyl, or hexyl components. In some embodiments, instead of, or in addition to, one or more hydrophobic amino acid residues being added, one or more cysteine residues, with a cholesterol derivative (cholesterol modified with a cysteine-reactive 2-bromoacetyl moiety) attached to its side-chain, are added “upstream” (N-terminal to) the MIS.

[0906] Elegantly, once inside the cell, the esterification moieties are cleaved off by esterases, and once the MIS is cleaved off the IF1 protein/fragment (or sequence variant thereof), which happens in the mitochondrial matrix, the N-terminal string of hydrophobic amino acid resides (and/or cysteine(s) with cholesterol derivative bound) is inherently cleaved off along with it, leaving the IF1 protein/fragment (or sequence variant thereof) unencumbered once it has successfully reached its intracellular destination.

[0907] In other embodiments, the N-terminal string of one or more hydrophobic amino acids (and/or cysteine(s) with cholesterol derivative bound) can also comprise one or more positively charged residues (e.g. is a Mitochondrial Penetrating Peptide (MPP) sequence as disclosed elsewhere herein), e.g. arginine, and/or partially/completely comprise one or more amino acids that have a reasonably high log P, which are capable of adopting a positive charge e.g. histidine.

Aliphatic Chain Attached (e.g. Fatty Acid Acylated to N-Terminus)

[0908] In some fusion protein embodiments, wherein one or more (or zero) carboxyl groups are esterified (e.g. with a group specified herein), a lipophilic moiety (or plural thereof) is attached to the N- and/or C-terminus, and/or to one or more amino-acid side chains of the sequence, wherein this lipophilic moiety can be an alkyl group (preferably with 2 to 100 carbon atoms, more preferably 2 to 25 carbon atoms), optionally an alkyl group with at least one carboxyl group (e.g. fatty acid), or more thereof (e.g. two carboxyl groups in a fatty di-acid), optionally wherein at least one lipophilic substituent is attached to at least one amino acid residue in the peptide/protein sequence in such a way that:
[0909] (i) a carboxyl group of a lipophilic substituent forms an amide bond with an amino group of the amino acid residue, or
[0910] (ii) an amino group of a lipophilic substituent forms an amide (or ester) bond with a carboxyl group of the amino acid residue, or
[0911] (iii) a lipophilic substituent is attached via a “spacer” (optionally wherein the spacer is an amino acid(s) residue, except Cys, or a dipeptide(s) such as Gly-Lys [in either orientation]), optionally wherein
   [0912] (a) an amino group of the peptide/protein forms an amide bond with a carboxylic group of a spacer (e.g. amino acid, e.g. L-γ-glutamic acid), and an amino group of the spacer forms an amide bond with a carboxyl group of a lipophilic substituent, or
   [0913] (b) a carboxyl group of the peptide/protein forms an amide bond with an amino group of a spacer (e.g. Asp or Glu or a dipeptide containing one or both) and a carboxyl group of the spacer forms an amide bond with an amino group of a lipophilic substituent,
      in some embodiments the lipophilic moiety is an acyl group of a straight-chain or branched fatty acid. The related teaching of WO98/08871, WO99/43706, and similar, are herein incorporated, in their entirety, by reference, especially the lipophilic moieties they disclose and how to attach them to a peptide/protein.

[0914] In some fusion protein embodiments, optionally/preferably wherein one or more (or zero) carboxyl groups are esterified (e.g. with a group specified herein), an aliphatic chain (linear or branched) is connected to the N-terminus, optionally containing >5/10/20/30/40/50/100 carbons (preferably less than 25, and more than 10), optionally wherein one or more amino acids (e.g. 1 to 5 residues, optionally wherein each is glycine and/or a hydrophobic amino acid, wherein this amino acid(s) can be termed a “linker”) may be between the aliphatic chain and the start of the MIS sequence. So, in some embodiments, a fusion protein comprises (or consists of): presented in N to C-order (with the aliphatic chain attached to the N-terminus): [aliphatic chain]-[MIS]-[IF1 protein/fragment (or sequence variant thereof)] or [aliphatic chain]-[linker]-[MIS]-[IF1 protein/fragment (or sequence variant thereof)]. In some embodiments, the N-terminal aliphatic chain is that of a fatty acid acylated to the N-terminus: [fatty acid as acyl attachment to N-terminus]-[MIS]-[IF1 protein/fragment (or sequence variant thereof)] or [fatty acid as acyl attachment to N-terminus]-[linker]-[MIS]-[IF1 protein/fragment (or sequence variant thereof)]. In some embodiments, the fatty acid is palmitic acid, attached by an acyl connection to form a palmitoyl group. In alternative embodiments, instead of, or in addition to, an aliphatic chain/fatty acid connected to the N-terminus, at least one aliphatic chain (linear or branched, containing >5/10/20/30/40/50/100 carbons [preferably less than 25 and more than 10]) is/comprises at least one side-chain of at least one non-natural amino acid (e.g. 2-aminooctadecanoic acid) in the peptide/protein sequence, and/or at least one fatty acid is attached/acylated to at least one amino acid side-chain (e.g. to that of lysine(s) e.g. as in insulin detemir or insulin degludec), which is “upstream” of (N-terminal to) the MIS sequence. In some embodiments, an attached aliphatic chain(s) is courtesy of an attached palmitoyl group(s), which can for example, attach to the N-terminus (e.g. as in palmitoyl pentapeptide-4 [Matrixyl™], U.S. Pat. No. 6,620,419B1, wherein the N-terminus is acylated with a palmitoyl group), courtesy of reaction with palmitic acid. In other embodiments, an attached (e.g. to N-terminus) aliphatic chain(s) is courtesy of a different fatty acid group(s) attached, optionally with 2 to 100 (or 2 to 25) carbons, hydroxylated or not, saturated or not, linear or branched, sulfurated or not, cyclic or not. At least one conjugated fatty acid moiety (non-limiting e.g. to one or more of N-terminus, lysine/cysteine/serine/tyrosine side-chain[s]) can confer peptide/protein ability to self-associate and/or bind albumin in the blood, which can (sterically) decrease protease(s) access to the peptide/protein, and/or slow its renal clearance, and dramatically increase its half-life in the blood (e.g. from minutes to hours), which can be extremely advantageous. Conjugation of a fatty acid(s) reported/predicted to bind albumin is especially preferred, and/or conjugation of a fatty acid (and optionally its “spacer” moiety if applicable) present in a licensed/clinical candidate peptide/protein based drug, e.g. in one or more of insulin detemir, insulin degludec, liraglutide, semaglutide. Conjugation of a fatty acid(s), e.g. conjugation with palmitic acid (palmitoylation), can increase skin penetration of a peptide/protein.

[0915] SEQUENCE A (not in Sequence Listing because it cannot be sufficiently described by the WIPO.25 standard) comprises up to 25 natural and/or non-natural (e.g. D-amino acid) amino acid residues, preferably less than 10, more preferably less than 5, optionally just 1 amino acid residue long, wherein each and every residue position can be absent (if all are absent, then this sequence is absent), or independently be any amino acid, optionally glycine or alanine, optionally including one or more hydrophobic amino acids (optionally at least as hydrophobic as phenylalanine), optionally including one or more positively charged amino acids (optionally lysine and/or arginine), optionally including one or more reasonably hydrophobic amino acids with, or with an ability to adopt, a positive charge (e.g. histidine), optionally wherein one or more residues are lipidated (covalently bound by a lipidic/lipid moiety [non-limiting e.g. myristate {e.g. bound to lysine}, palmitate {e.g. attached through a thioether bond to a cysteine residue or through an ester bond to a serine or threonine residue}]), optionally wherein there is a fatty acid moiety (saturated or non-saturated, linear or branched; or derivative thereof) conjugated/acylated to this sequence's N-terminus and/or at least one of the amino acid residues has a fatty acid moiety (saturated or non-saturated, linear or branched; or derivative thereof) conjugated to its side-chain, optionally wherein at least one of the amino acid residues is a lysine with a fatty acid moiety joined/acylated to its side-chain (non-limiting examples: optionally connected directly as observed in insulin detemir, alternatively wherein the fatty acid is conjugated to the side-chain via a “spacer” moiety, such as L-γ-glutamic acid, which is used as a spacer [between fatty acid and lysine side-chain] in insulin degludec and liraglutide, wherein the use of a more elaborate spacer [e.g. as in semaglutide, wherein the spacer is L-γ-glutamic acid and two OEG {8-amino-3,6-dioxaoctanoic acid} units] is also contemplated), preferably wherein each conjugated fatty acid contains between 2 and 200 carbons, more preferably between 2 and 25 carbons, optionally being a myristoyl/palmitoyl/stearoyl group, preferably wherein there is only one fatty acid conjugated to this sequence in total. Such a sequence, comprising a lysine residue with a fatty acid conjugated (directly, without a “spacer”) to its side-chain, can be made according to the teaching of (or a shorter sequence can be made by the same teaching, optionally wherein the favouring of negative amino acid residues therein, specifically serine, surrounding the lysine residue, isn't followed [because they can disfavour cellular penetration]), which can then be concatenated to the N-terminal end of a peptide/protein of/in this disclosure, to produce a further peptide/protein of this disclosure. In some embodiments, SEQUENCE A contains at least one cysteine residue with a cholesterol derivative conjugated to its side-chain (e.g. cholesterol modified with a cysteine-reactive 2-bromoacetyl moiety conjugated to cysteine side-chain by a disulphide bond) or contains at least one cysteine residue with a fatty acid (or derivative thereof) moiety conjugated to its side-chain, optionally via a disulphide bond, optionally as taught by the Reversible Aqueous Lipidization (REAL) technology ([196], U.S. Pat. Nos. 5,907,030, 6,093,692, 6,225,445B1, U.S. Pat. No. 7,052,704B2, US2013/0053433A1, WO96/22773), optionally wherein the fatty acid derivative is [hydrogen atoms not shown]: S—C—C(COOH)—N—C(O)—(C)ₙ wherein n is between 2 and 100, preferably between 2 and 25, wherein (C)ₙ can be linear or branched, saturated or unsaturated. Note that disulphide bonds break in the reducing intracellular environment. In some preferred embodiments, SEQUENCE A only has a single lipophilic moiety (cholesterol/fatty acid or derivative thereof) bound to it.

[0916] SEQUENCE A concatenated to any other sequence of/in this disclosure is, in turn, a sequence of this disclosure. In preferred fusion protein embodiments: (i) if a Mitochondrial Import Sequence (MIS) is present, SEQUENCE A is present “upstream” of (N-terminal to) it [such that it is also cleaved off when the MIS is cleaved off in the mitochondrial matrix], (ii) if an MIS and a CPP sequence are present, SEQUENCE A is present “upstream” of (N-terminal to) the MIS, between the CPP and MIS, or “upstream” of (N-terminal to) both.

[0917] SEQ ID NO:439 is an approximation to SEQUENCE A within the constraints of the WIPO.25 standard.

[0918] SEQUENCE A or SEQ ID NO:439 concatenated to SEQ ID NO:X (or fragment thereof, or concatenated fragments thereof),
[0919] wherein X can be 1, or the number of sequences in the Sequence Listing component to this application, or any integer between 1 and the total number of sequences in the Sequence Listing component to this application.

### Polynucleotides, Vectors, Gene Therapies, Cells, Transgenic Organisms Thereof

[0920] A polynucleotide, or a pharmaceutical/cosmetic composition thereof, encoding (by the genetic code; optionally using the codon bias of at least one species that will/might express the polynucleotide, wherein the codons used for each amino acid are the most [or one of the most] frequently used for each amino acid in the codon bias of the species [use instead of a pooled codon bias, of a number of different species that will/might express the polynucleotide, is also contemplated]) at least one peptide/protein of/in this disclosure is a polynucleotide of this disclosure;
[0921] A polynucleotide, or a pharmaceutical/cosmetic composition thereof, comprising (or consisting of) at least one nucleotide/nucleic acid sequence that codes/encodes (by the genetic code) for at least one of SEQ ID NO:X (or a fragment thereof, or concatenated fragments thereof);
[0922] A polynucleotide, or a pharmaceutical/cosmetic composition thereof, comprising (or consisting of) at least one nucleotide/nucleic acid sequence that codes/encodes (by the genetic code) for at least one of SEQ ID NO:X (or a fragment thereof, or concatenated fragments thereof) and/or that codes/encodes for a sequence variant/conservatively modified variant/functional variant/[conservatively modified, and functional, sequence variant] thereof;
[0923] Both the coding and the complimentary non-coding polynucleotide strands are contemplated, existing either single- or double-stranded (or mixture thereof);
[0924] A vector/plasmid/gene therapy/virus/cell/transgenic organism, or a pharmaceutical/cosmetic composition thereof, comprising at least one nucleotide/nucleic acid sequence that codes/encodes (by the genetic code) for at least one of SEQ ID NO:X (or a fragment thereof, or concatenated fragments thereof);
[0925] A vector/plasmid/gene therapy/virus/cell/transgenic organism, or a pharmaceutical/cosmetic composition thereof, comprising at least one nucleotide/nucleic acid sequence that codes/encodes (by the genetic code) for at least one of SEQ ID NO:X (or a fragment thereof, or concatenated fragments thereof) and/or that codes/encodes (by the genetic code) for a sequence variant/conservatively modified variant/functional variant/[conservatively modified, and functional, sequence variant] thereof;
[0926] wherein X can, independently selected in each case of using X, be 1, or the number of sequences in the Sequence Listing component to this application, or any integer between 1 and the total number of sequences in the Sequence Listing component to this application.

[0927] Due to the degeneracy/redundancy of the genetic code, it is clear to one of the art how any nucleic acid sequence of/in this disclosure can be modified without modifying the amino acid sequence it codes for by the genetic code, to arrive at further nucleotide sequences of this disclosure. Herein contemplated are polynucleotide variants with one or more codons substituted for a different codon, independently selected at each position, but wherein each substituted codon confers the same amino acid at the same position in the encoded amino acid sequence (a “silent change”). Some other contemplated polynucleotide variants are those conferring a change in amino acid at one or more positions, but wherein each is a “conservative” substitution (substituted amino acid is different but has similar biophysical properties). With the polynucleotide sequences of/in this disclosure in hand, one of the art can arrive at “conservatively modified” variants thereof, which are componentry to this disclosure.

### Section Optimized for Protection in China (Especially, but not Exclusively)

[0928] A peptide/protein of (a) or (b) as follows:
[0929] (a) a peptide/protein whose amino acid sequence is represented by SEQ ID NO:X (or fragment thereof, or concatenated fragments thereof),
[0930] (b) a peptide/protein derived from the peptide/protein of (a) by substitution and/or deletion and/or addition of a number of (e.g. several) amino acids in the amino acid sequence in (a), and having the activity of (a),
[0931] wherein peptide/protein (a) or (b) can be synthesized by standard methods of the art (e.g. refer herein, and in references herein) and the activity of peptide/protein (a) or (b) can be verified by a Sub-Mitochondrial Particle (SMP) F₁F₀ ATP hydrolysis assay of the art, as herein described (and in references herein, wherein the exerted activity of (a) and (b) is reduced F₁F₀ ATP hydrolysis at pH 6 and/or pH 8);
[0932] wherein X can, independently selected in each case of using X, be 1, or the number of sequences in the Sequence Listing component to this application, or any integer between 1 and the total number of sequences in the Sequence Listing component to this application;
[0933] wherein a gene/polynucleotide encoding peptide/protein of (a) or (b) is componentry to this disclosure.

### Description Component Written as a Claim Set

### Cosmetic Thereof

[0934] [1] A cosmetic/pharmaceutical/dermopharmaceutical/topical composition comprising (or consisting of) at least one compound that can inhibit/reduce F₁F₀ ATP hydrolysis (e.g. in a cell and/or in a Sub-Mitochondrial Particle [SMP] assay of F₁F₀ ATP hydrolysis), optionally such a compound(s) of this disclosure, optionally at least one compound of at least one of Formula (I), (II), (III), (IV), (V), (VI), (VII), (VIII), [X], and/or at least one cosmetically/pharmaceutically acceptable salt, solvate, hydrate, prodrug, liposome, nanoparticle (e.g. lipid nanoparticle, LNP) or other vector of the art thereof;
[0935] optionally in a form suitable for application to the skin/scalp of a subject (optionally human), optionally their face;
[0936] optionally wherein the composition contains at least one cosmetically/dermatologically acceptable carrier;
[0937] optionally wherein the composition contains at least one further active agent, which can perform one or more of skin/scalp care/protection/treatment/repair/beautification/cleaning/fragrance/cosmetic purpose/appearance change, optionally for human skin/scalp, wherein a number of such agents are known in the art (non-limiting e.g. retinol and other retinoids);
[0938] optionally wherein at least one aim/use of the cosmetic/pharmaceutical/dermopharmaceutical/topical composition (non-limiting e.g. as communicated in text and/or visually and/or diagrammatically and/or verbally and/or electronically in one or more of its packaging, associated packaging, package/paper insert(s), instruction(s) and/or warning(s) for use, marketing, promotion, advertisement(s), product education, associated website[s]) is changing/improving the appearance/aesthetic of the administered subject, optionally for conferring/maintaining a younger appearance.

[0939] [2] A cosmetic/pharmaceutical/dermopharmaceutical/topical composition comprising (or consisting of) at least one [any] IF1 protein/fragment (or sequence variant(s) thereof, including partially/completely retroinverse sequence thereof), and/or fusion protein(s) thereof (optionally comprising at least one Cell Penetrating Peptide [CPP] sequence, optionally a Tat and/or poly-arginine sequence, optionally partially/completely retroinverse sequence thereof), optionally lipidated (i.e. with at least one covalently bound lipidic/lipid moiety, optionally at least one fatty acid [optionally acylated to its N-terminus] e.g. [non-limiting] a myristoyl/palmitoyl/stearoyl group), optionally modified at its N- (non-limiting e.g. acylated [non-limiting e.g. acetylated]) and/or C-terminal (non-limiting e.g. amidated) ends, optionally containing one or more non-natural amino acids, optionally wherein one or more amino-acids in the sequence are corresponding D-amino acids, optionally wherein one or more of its carboxyl groups are esterified, and/or at least one cosmetically/pharmaceutically acceptable salt, solvate, hydrate, prodrug, liposome, nanoparticle (e.g. lipid nanoparticle, LNP) or other vector of the art thereof;
[0940] optionally a cosmetic composition comprising (or consisting of) at least one peptide/protein (optionally with one or more of its carboxyl groups esterified) comprising (or consisting of) [preferably wherein the following is in N to C-terminal order] at least one Cell Penetrating Peptide sequence (CPP, e.g. a poly-arginine CPP, optionally with a fatty acid [e.g. of between 2 to 25 carbons] acylated to its N-terminal end) conjoined with (e.g. peptide bonded to) at least one Mitochondrial Import Sequence (MIS; conferring mitochondrial matrix localization, optionally/preferably wherein the MIS is that used by the species administered to for its native IF1 protein; e.g. MIS that human uses for its native IF1 protein) conjoined with (e.g. peptide bonded to) at least one “mature” (without MIS) IF1 protein/fragment (or sequence variant thereof) that is optionally/preferably an IF1 protein sufficiently truncated at its C-terminal end (non-limiting e.g. truncated up to {using “mature” [without MIS] IF1 protein numbering} its 60^{th} or 47^{th} residue), and/or optionally truncated at its N-terminal end (non-limiting e.g. by any number of residues up to 9 [or 13] residues), and/or with one or more amino acid substitutions in its “phosphorylation control switch” and/or “pH dependence motif” (FIG. 10; non-limiting e.g. one or more of {using “mature” [without MIS] IF1 protein numbering} S14A [or T14A], E26A [or Q26A or E26Q], H48A [or Y48A], H49K [or H49A or H49R], H55A [or Y55A or V55A], H56A [or T56A or S56A] substitutions), such that it can still inhibit F₁F₀ ATP hydrolysis but it cannot (or cannot as readily) form IF1 protein tetramers (and higher oligomers) at alkaline pH, preferably such that it can more potently inhibit F₁F₀ ATP hydrolysis at the normal, alkaline pH (˜pH 8) of the mitochondrial matrix (than native/unmodified IF1 protein), optionally/preferably wherein this IF1 protein/fragment (or sequence variant thereof) has a sequence derived/modified from the IF1 protein sequence of the species to be administered to [e.g. human] or a species with a longer maximal lifespan, optionally a species with a very long maximal lifespan such as a whale, e.g. bowhead or blue whale, and/or at least one cosmetically acceptable salt, solvate, hydrate, prodrug, liposome, nanoparticle (e.g. lipid nanoparticle, LNP) or other vector of the art thereof;
[0941] optionally a cosmetic composition comprising (or consisting of) at least one peptide/protein comprising (or consisting of) at least one sequence that is a designed concatenation of sequences that are each naturally occurring in the human body, e.g, wherein the CPP component is SEQ ID NO:455 (or SEQ ID NO:461, or residues 4-11 of SEQ ID NO:453), the MIS component is SEQ ID NO:162, and the IF1 protein/fragment sequence component is from human IF1 protein (non-limiting e.g. using “mature” [without MIS] IF1 protein numbering: residues: 1-60, 10-60, 14-60, 13-47, 14-47, 42-58, which are the amino acid sequences encoded by DNA sequences SEQ ID NO:1473, SEQ ID NO:1476, SEQ ID NO:1479, SEQ ID NO:1482, SEQ ID NO:1485, SEQ ID NO:1488 respectively), and/or at least one cosmetically acceptable salt, solvate, hydrate, prodrug, liposome, nanoparticle (e.g. lipid nanoparticle, LNP) or other vector of the art thereof;
[0942] optionally a cosmetic/pharmaceutical/dermopharmaceutical/topical composition comprising (or consisting of) at least one peptide/protein comprising (or consisting of) at least one of SEQ ID NO:X (or fragment thereof or concatenated fragments thereof and/or sequence variant thereof), wherein X can be 1, or the number of sequences in the Sequence Listing component to this application, or any integer between 1 and the total number of sequences in the Sequence Listing component to this application,
[0943] [e.g. optionally a cosmetic/pharmaceutical/dermopharmaceutical/topical composition comprising (or consisting of) at least one peptide/protein comprising (or consisting of) at least one sequence selected from SEQ ID NO:166 to SEQ ID NO:438, and/or at least one fragment thereof (for non-limiting example wherein the epitope/affinity tag component [if present] is absent, and/or the Cell Penetrating Peptide component [if present] is absent), and/or concatenated fragments thereof, and/or a functional (can inhibit/reduce F₁F₀ ATP hydrolysis in a cell and/or in a Sub-Mitochondrial Particle [SMP] assay of F₁F₀ ATP hydrolysis) sequence variant(s) thereof {optionally produced by conservative substitution(s)}], and/or at least one cosmetically/pharmaceutically acceptable salt, solvate, hydrate, prodrug, liposome, nanoparticle (e.g. lipid nanoparticle, LNP) or other vector of the art thereof;
[0944] optionally in a form suitable for application to the skin/scalp of a subject (optionally human), optionally their face;
[0945] optionally wherein the composition contains at least one cosmetically/dermatologically acceptable carrier;
[0946] optionally wherein the composition contains at least one further active agent, which can perform one or more of skin/scalp care/protection/treatment/repair/beautification/cleaning/fragrance/cosmetic purpose/appearance change, optionally for human skin/scalp, wherein a number of such agents are known in the art (e.g. retinol and other retinoids);
[0947] optionally wherein at least one aim/use of the cosmetic/pharmaceutical/dermopharmaceutical/topical composition (non-limiting e.g. as communicated in text and/or visually and/or diagrammatically and/or verbally and/or electronically in one or more of its packaging, associated packaging, package/paper insert(s), instruction(s) and/or warning(s) for use, marketing, promotion, advertisement(s), product education, associated website[s]) is changing/improving the appearance/aesthetic of the administered subject, optionally for conferring/maintaining a younger appearance.

[0948] [3] A cosmetic/pharmaceutical/dermopharmaceutical/topical composition comprising (or consisting of) at least one peptide derived from at least one IF1 protein.

[0949] [4] A cosmetic/pharmaceutical/dermopharmaceutical/topical composition according to one or more of Claims 1-3 wherein at least one IF1 protein/fragment (or sequence variant thereof) is present at a concentration between 0.000001% [or 0.0001%] (w/w) and 5% [or 15% or 20% or 70%] (w/w) by total weight of the composition.

[0950] [5] A cosmetic/pharmaceutical/dermopharmaceutical/topical composition according to one or more of Claims 1-4 further comprising one or more ingredients selected from a group comprising (or consisting of):
[0951] extracted lipids, synthetic lipids, gelifying polymers, thickening polymers, tensioactive polymers, emulsifying polymers, hydrosoluble active principles, liposoluble active principles, plant extracts, vegetable extracts, tissue extracts, marine extracts, cell extracts, essential oils, mineral salts, solar/sun filters, antioxidants, organic or aqueous-glycolic solvents, fatty substances, ionic or non-ionic thickeners, softeners, opacifiers, stabilizers, emollients, silicones, alpha-hydroxy acids, antifoaming agents, moisturizing agents, vitamins, perfumes, preservatives, sequestrating agents, colouring agents, gel-forming and viscosity increasing polymers, surfactants and emulsifiers, other water- or fat-soluble active substances, moisturizers, barrier agents, skin-revitalizing agents, organic solvents,
[0952] an amount (preferably a cosmetically/pharmaceutically effective amount) of at least one active agent selected from a group comprising (or consisting of): retinol, retinoid, agents which inhibit PAR-2 activity, analgesic agents, anesthetic agents, cyclic adenosine monophosphate synthesis stimulating agents, elastase inhibiting agents, matrix metalloproteinases inhibiting agents, melanin synthesis stimulating or inhibiting agents, whitening or depigmenting agents, propigmenting agents, self-tanning agents, anti-aging agents, NO-synthase inhibiting agents, 5α-reductase inhibiting agents, lysyl- and/or prolyl hydroxylase inhibiting agents, antioxidants, free radical scavengers, agents against atmospheric pollution, reactive carbonyl species scavengers, anti-glycation agents, antihistamine agents, anti-viral agents, anti-parasitic agents, emulsifiers, emollients, organic solvents, liquid propellants, skin and/or hair conditioners, humectants, substances that retain moisture, alpha hydroxyacids, beta hydroxyacids, moisturizers, epidermal hydrolytic enzymes, vitamins, pigments or colorants, dyes, gelling polymers, thickeners, surfactants, softening agents, anti-wrinkle agents, agents able to reduce or treat the bags under the eyes, exfoliating agents, antimicrobial agents, anti-fungal agents, fungistatic agents, bactericidal agents, bacteriostatic agents, agents stimulating the synthesis of dermal or epidermal macromolecules and/or capable of inhibiting or preventing their degradation, collagen synthesis-stimulating agents, elastin synthesis-stimulating agents, decorin synthesis-stimulating agents, laminin synthesis-stimulating agents, defensin synthesis-stimulating agents, cAMP synthesis-stimulating agents, chaperone synthesis stimulating agents, aquaporin synthesis-stimulating agents, hyaluronic acid synthesis-stimulating agents, fibronectin synthesis-stimulating agents, sirtuin synthesis-stimulating agents, agents stimulating the synthesis of lipids and components of the stratum corneum, agents stimulating the synthesis of ceramides, ceramides, agents that inhibit collagen degradation, agents that inhibit elastin degradation, agents that inhibit serine proteases such us cathepsin G, agents stimulating fibroblast proliferation, agents stimulating keratinocyte proliferation, agents stimulating adipocyte proliferation, agents stimulating melanocyte proliferation, agents stimulating keratinocyte differentiation, agents stimulating adipocyte differentiation, agents that inhibit acetylcholinesterase, skin relaxant agents, agents that inhibit acetylcholine receptors aggregation, agents that inhibit muscle contraction, anticholinergic agents, glycosaminoglycan synthesis-stimulating agents, antihyperkeratosis agents, comedolytic agents, antipsoriasis agents, DNA repair agents, DNA protecting agents, stabilizers, anti-itching agents, agents for the treatment and/or care of sensitive skin, firming agents, anti-stretch mark agents, binding agents, agents regulating sebum production, lipolytic agents or agents stimulating lipolysis, anti-cellulite agents, agents modulating the activity of PPARY, agents which increase or reduce the triglyceride content of adipocytes, antiperspirant agents, agents stimulating healing, coadjuvant healing agents, agents stimulating reepithelialization, coadjuvant reepithelialization agents, cytokine growth factors, calming agents, anti-inflammatory agents, anesthetic agents, agents acting on capillary circulation and/or microcirculation, agents stimulating angiogenesis, agents that inhibit vascular permeability, venotonic agents, agents acting on cell metabolism, agents to improve dermal-epidermal junction, agents inducing hair growth, hair growth inhibiting or retardant agents, agents preventing/delaying hair loss, preservatives, perfumes, chelating agents, agents obtained from a biofermentation process, agents obtained from a biotechnological process, mineral salts, sunscreens, organic or mineral photoprotective agents active against ultraviolet A and/or B rays and/or infrared A rays, amino acids, peptides, proteins, enzymes, catalysts, cleaning agent, hair conditioning agent, skin conditioning agent, hair styling agent, antidandruff agent, hair growth promoter, perfume, sunscreen, sunblock, pigment, moisturizer, film former, hair colour, make-up agent, detergent, pharmaceutical, thickening agent, emulsifier, humectant, emollient, antiseptic agent, deodorant active, dermatologically acceptable carrier, surfactant, abrasive, absorbent, fragrance, colouring/colorant, essential oil, skin sensate, astringent, anti-acne agent, anti-caking agent, antifoaming agent, antimicrobial, antioxidant, binder, biological additive, enzyme, enzyme inhibitor, enzyme activator, coenzyme, botanical extract, ceramide, peptide, buffering agent, bulking agent, chelating agent, cosmetic biocide, polymer, quat, substantivity increasing agent, opacifying agent, pH adjuster, propellant, reducing agent, sequestrant, skin bleaching and/or lightening agent, skin conditioning agent, skin soothing and/or healing agent, aloe vera, pantothenic acid and/or derivative thereof, allantoin, bisabolol, dipotassium glycyrrhizinate, skin treating agent, thickener, and/or mixtures thereof.

[0953] [6] A cosmetic/pharmaceutical/dermopharmaceutical/topical composition according to one or more of Claims 1-5 wherein one or more active agents are encompassed/incorporated in one or more of carriers, liposomes, mixed liposomes, lipid particles, lipid vesicles, oleosomes, niosomes, ethosomes, millicapsules, microcapsules, nanocapsules, sponges, microsponges, cyclodextrins, vesicles, micelles, mixed micelles of surfactants, mixed micelles of surfactant-phospholipid, millispheres, microspheres, nanospheres, lipospheres, microemulsions, nanoemulsions, miniparticles, milliparticles, microparticles, nanoparticles (Lipid NanoParticles, LNPs), solid lipid nanoparticles, nanostructured lipid carriers, phospholipid mini-vesicles, or similar, or a carrier used in one or more cosmetics/dermopharmaceuticals/pharmaceuticals on the market and/or in clinical trials.

[0954] [7] A cosmetic/pharmaceutical/dermopharmaceutical/topical composition according to one or more of Claims 1-6 in at least one form/formulation selected from a group comprising (or consisting of): gel, emulsion, oil/water emulsion, water/oil emulsion, milk, lotion, ointment, stick, pencil, spray, cream, cream gel, multiple emulsion, anhydrous composition, aqueous dispersion, oil, balsam, foam, hydroalcoholic solution, hydroglycolic solution, hydrogel, liniment, sera, serum, mousse, pomade, powder, bar, aerosol, granule, solution, suspension, emulsion, syrup, polysaccharide film, jelly, gelatin, emollient lotion, emollient milk, emollient cream, emulsion of oil and/or silicone in water, emulsion of water in oil and/or silicone, balm, liquid, paste, aerosol, butter,
[0955] and/or incorporated into a product for administration/application to the human skin/scalp, optionally selected from a group comprising (or consisting of): cosmetic product for use upon the skin/scalp, cosmetic product for use upon the face, daily use skin care product, exfoliant, skin smoothing product, product for improving/smoothing skin texture, anti-aging/anti-wrinkle skin product/cream/serum, anti-hair loss product, hair growth promoting product, anti-hair greying product, hair dye, skin cream, face cream, eye cream, anti-acne/spot cream, moisterizer, cleanser, shampoo, conditioner, anti-dandruff product, soap, shower gel, scalp lotion, body oil, skin/body/face scrub, milk/cream for care of skin and/or hair, cleansing cream, foundation tint base, sunscreen/sunblock/sun cream (e.g. offering protection against UVA and/or UVB radiation), fake sun tan product, skin darkening product, skin whitening product/cream, shaving cream/foam/balm, perfume, aftershave, deodorant, anti-persperant, make-up product, lip rouge, lipstick, lip gloss, lip protector, mascara, nail varnish, concealer, under-eye concealer, blusher, mascara, make-up foundation, foundation, BB cream or CC cream or DD cream or similar, make-up removing product/lotion/milk/cream, eye shadow, unguent, anti-cellulite product, anti-stretch mark product, anti-varicose vein product, daily peel, face mask, eye mask, night mask, sleeping mask, toothpaste, mouthwash,
[0956] and/or incorporated/absorbed/adsorbed into one or more of a fabric, non-woven fabric, textile, a material used for clothing, garment, natural or synthetic fibre, wool, face mask, sleeping mask, eye mask, plaster, medical device, bandage, gauze, wipe, patch, adhesive skin patch, non-adhesive skin patch, microelectric patch, towelette, hydrogel,
[0957] and/or adsorbed on at least one cosmetically/pharmaceutically acceptable solid organic polymer or solid mineral support selected from the group comprising (or consisting of) talc, bentonite, silica, starch, maltodextrin or inorganic carrier, adsorbed on powdered organic and/or inorganic polymers.

[0958] [8] A method that comprises administering to a subject (and/or the subject self-administering) an amount (preferably an effective amount e.g. a cosmetically effective amount) of at least one cosmetic/pharmaceutical/dermopharmaceutical/topical composition according to one or more of claims 1-7;
[0959] optionally administered to the subject's skin/scalp, optionally their face, optionally wherein the subject is a human.

[0960] [9] A method of eliminating/reducing/slowing/delaying/preventing one or more visible signs of aging comprising applying at least one cosmetic/pharmaceutical/dermopharmaceutical/topical composition according to one or more of Claims 1-7 to one or more areas of human skin (optionally already showing one or more signs of aging), preferably wherein said composition is applied at least once per day for a time period sufficient to provide an elimination/reduction/slowing/delay/prevention in the visible signs of aging of that portion of human skin, wherein said time period is at least 2 weeks (optionally wherein the administered region of human skin is compared to an unadminstered region of human skin, optionally of same/similar age, optionally from the same person, to compare their degree/severity of one or more visable signs of aging).

[0961] A method of treatment and/or care of the skin which comprises administering to the skin an amount (preferably an effective amount) of at least one cosmetic/pharmaceutical/dermopharmaceutical/topical composition according to one or more of Claims 1-7,
[0962] optionally wherein said treatment and/or care of the skin is the treatment of one or more signs of aging and/or photoaging and/or treatment of skin affected by wrinkles and/or expression lines.

### New Compositions of Matter

[0963] A novel functional (can inhibit/reduce F₁F₀ ATP hydrolysis [e.g. in a Sub-Mitochondrial Particle (SMP) assay of F₁F₀ ATP hydrolysis]) IF1 protein/fragment comprising (or consisting of) married/combined fragment(s)/residue(s) of IF1 protein sequences from two or more different species, preferably wherein at least one of these species has a high maximal lifespan, preferably equal to or longer than human, more preferably longer than human e.g. bowhead or blue whale;
[0964] optionally wherein the IF1 protein sequence of a species has a C-terminal region (e.g. containing the “pH dependence motif” [FIG. 10]) substituted with the corresponding region (same range of residue position numbers) from a different species, preferably a species with a greater maximal lifespan, e.g. human IF1 protein sequence (optionally containing a S14A substitution) with a C-terminal region substituted with the corresponding sequence region (same range of residue position numbers) from blue or bowhead whale IF1 protein, non-limiting e.g, wherein (using “mature” [without MIS] IF1 protein numbering) up to the 42^{nd} or 47^{th} residue is human IF1 protein sequence, and the remainder of the sequence is from blue or bowhead whale IF1 protein sequence (or sequence variant thereof, e.g. containing a H49K substitution);
[0965] non-limiting e.g. sequence wherein (using “mature” [without MIS] IF1 protein numbering) up to its 42^{nd} or 47^{th} residue is blue whale IF1 protein sequence (optionally with a T14A substitution), and the remainder of the sequence is from bowhead whale IF1 protein sequence (or sequence variant thereof, e.g. containing a H49K substitution), optionally a fusion protein thereof (e.g. of a form used herein, e.g. comprising one or more of an epitope/affinity tag, CPP, MIS sequence);
[0966] in some embodiments the N-terminal region (non-limiting e.g. up to the 42^{nd} or 47^{th} residue, using “mature” [without MIS] IF1 protein numbering) of a novel IF1 protein/fragment (or sequence variant thereof) is from a species of which one or more subjects will be administered with it (and/or administered with a fusion protein thereof; optionally for at least one therapeutic/cosmetic purpose disclosed herein; non-limiting e.g. human or mouse) and part or all of the remainder/C-terminal region (non-limiting e.g. comprising part or all of the “pH dependence motif” [FIG. 10], and/or [using “mature” {without MIS} IF1 protein numbering] up to the 60^{th} or 81^{st} or 82^{nd} [if possible] or 84^{th} [if possible] residue of the IF1 protein) is from the IF1 protein sequence (or sequence variant thereof, optionally with a H49K substitution) of a longer-living species, with a higher maximal lifespan (non-limiting e.g. blue or bowhead whale).

[0967] An “immature” (with Mitochondrial Import Sequence, MIS) or “mature” (without MIS) IF1 protein/fragment (or sequence variant thereof), or fusion protein thereof, wherein one or more of the following applies to (is true of) part(s) or all of it (wherein all possible combinations are contemplated {including all possible combinations of elements/descriptors within, and across, different bullet points} except those that are mutually exclusive):
[0968] (i) produced/isolated/purified/substantially purified/partially purified;
[0969] (ii) associated with a pharmaceutically/cosmetically acceptable salt[s];
[0970] (iii) IF1 protein/fragment (or sequence variant thereof) component/entirety comprises (or consists of) bowhead whale (Balaena mysticetus) IF1 protein;
[0971] (iv) IF1 protein/fragment (or sequence variant thereof) component/entirety comprises (or consists of) blue whale (Balaenoptera musculus) IF1 protein;
[0972] (v) one or more (or two/three/four/five/six/seven/eight/nine/ten/eleven/twelve/thirteen/fourteen/fifteen/sixteen/seventeen or more) of the following is true of the IF1 protein/fragment (or sequence variant thereof) component/entirety: (using “mature” [without Mitochondrial Import Sequence, MIS] IF1 protein numbering): 49^{th} residue is not histidine, 14^{th} residue is not a residue that can be phosphorylated (i.e. is not serine or threonine), 26^{th} residue is not glutamic acid, 48^{th} residue is not histidine, 55^{th} residue is not histidine, 56^{th} residue is not histidine, 49^{th} residue is lysine or alanine or arginine, 14^{th} residue is alanine, 26^{th} residue is alanine or glutamine, 48^{th} residue is alanine, 55^{th} residue is alanine, 56^{th} residue is alanine, 79^{th} residue is glycine or asparagine, 76^{th} residue is lysine, 73^{rd} residue is serine, 62^{nd} residue is histidine, 82^{nd} residue is aspartic acid, 83^{rd} residue is aspartic acid, 84^{th} residue is aspartic acid, 85^{th} residue is aspartic acid, 57^{th} residue is valine, 54^{th} residue is serine or aspartic acid, 61^{st} residue is glutamine, 51^{st} residue is asparagine, 47^{th} residue is glutamic acid, 46^{th} residue is arginine, 44^{th} residue is serine, 39^{th} residue is lysine, 38^{th} residue is alanine or glutamic acid, 37^{th} residue is arginine or cysteine or lysine, 36^{th} residue is aspartic acid or glutamic acid, 29^{th} residue is histidine, 27^{th} residue is alanine, 25^{th} residue is lysine, 17^{th} residue is aspartic acid, 12^{th} residue is glycine, 11^{th} residue is serine or threonine, 10^{th} residue is serine or glycine, 9^{th} residue is glycine, 8^{th} residue is leucine or glycine, 6^{th} residue is aspartic acid or glycine, 5^{th} residue is alanine, 4^{th} residue is serine or glycine, 3^{rd} residue is glutamic acid or serine or lysine, 2^{nd} residue is glycine, 1^{st} residue is leucine, wherein in particular sub-embodiments (wherein all possible combinations are contemplated, except if mutually exclusive):
   [0973] (a) three (3) or more of the list is true;
   [0974] (b) five (5) or more of the list is true;
   [0975] (c) seven (7) or more of the list is true;
   [0976] (d) nine (9) or more of the list is true;
   [0977] (e) eleven (11) or more of the list is true;
   [0978] (f) thirteen (12) or more of the list is true;
   [0979] (g) fourteen (14) or more of the list is true;
   [0980] (h) fifteen (15) or more of the list is true;
   [0981] (i) sixteen (16) or more of the list is true;
   [0982] (j) seventeen (17) or more of the list is true;
   [0983] (k) at least one IF1 protein/fragment sequence variant comprises (or consists of) the IF1 protein/fragment sequence of human (or other species with a long maximal lifespan, optionally a species with a longer maximal lifespan than human) with one or more substitutions (and/or addition of one or more aspartic acid residues to its C-terminal end) to make one or more of the list be true;
   [0984] (l) at least one IF1 protein/fragment sequence variant comprises (or consists of) the IF1 protein/fragment sequence of bowhead/blue whale with one or more substitutions (and/or addition of one or more aspartic acid residues to its C-terminal end) to make one or more of the list be true;
[0985] (vi) IF1 protein/fragment (or sequence variant thereof) component/entirety comprises (or consists of) a sequence variant of IF1 protein (preferably wherein one/two/three/four/five or more of the descriptors in bullet point (v) above apply to it) found in a long-lived species (high maximal lifespan), preferably which has an equal or greater maximal lifespan than Bos taurus, more preferably which has an equal or greater maximal lifespan than human, and more preferably which has a greater maximal lifespan than human e.g. bowhead or blue whale;
[0986] (vii) IF1 protein/fragment (or sequence variant thereof) component/entirety comprises (or consists of) an IF1 protein/fragment (optionally from mammal, Bos taurus, or human, or blue or bowhead whale) with one or more of {using “mature” [without MIS] IF1 protein numbering} S14A (or T14A), H49K (or H49A or H49R), E26A (or E26Q or Q26A), H48A (or Y48A), H55A (or Y55A), H56A (or T56A or S56A) substitutions, optionally also/instead with 1-3 (or 1-5) aspartic acid (D) residues added to its C-terminal end;
[0987] (viii) IF1 protein/fragment (or sequence variant thereof) component/entirety comprises (or consists of) human IF1 protein/fragment with one or more of {using “mature” [without MIS] IF1 protein numbering} S14A, H49K (or H49A or H49R), E26A (or E26Q), H48A, H55A, H56A substitutions, optionally also/instead with 1-3 (or 1-5) aspartic acid (D) residues added to its C-terminal end;
[0988] (ix) IF1 protein/fragment (or sequence variant thereof) component/entirety comprises (or consists of) blue whale IF1 protein/fragment with one or more of {using “mature” [without MIS] IF1 protein numbering} T14A, H49K (or H49A or H49R), E26A (or E26Q), H48A, H55A, H56A substitutions, optionally also/instead with 1-3 (or 1-5) aspartic acid (D) residues added to its C-terminal end;
[0989] (x) IF1 protein/fragment (or sequence variant thereof) component/entirety comprises (or consists of) bowhead whale IF1 protein/fragment with one or more of {using “mature” [without MIS] IF1 protein numbering} H49K (or H49A or H49R), E26A (or E26Q), H48A, H55A, H56A substitutions, optionally also/instead with 1-3 (or 1-5) aspartic acid (D) residues added to its C-terminal end;
[0990] (xi) IF1 protein/fragment (or sequence variant thereof) component/entirety comprises (or consists of) an IF1 protein fragment (using “mature” [without MIS] IF1 protein numbering) less than z amino acids long, wherein z is an integer selected from a group comprising 85, 84, 83, 82, 81, 80, 79, 78, 77, 76, 75, 74, 73, 72, 71, 70, 69, 68, 67, 66, 65, 64, 63, 62, 61, 60, 59, 58, 57, 56, 55, 54, 53, 52, 51, 50, 49, 48, 47, 46, 45, 44, 43, 42, 41, 40, 39, 38, 37, 36, 35, 34, 33, 32, 31, 30, 29, 28, 27, 26, 25, 24, 23, 22, 21, 20, 19, 18, 17, 16, 15, 14, 13, 12, 11, 10, 9, 8, 7, 6, 5, 4, 3, 2 [different values of z are different embodiments];
[0991] (xii) IF1 protein/fragment (or sequence variant thereof) component/entirety comprises (or consists of) an IF1 protein fragment (using “mature” [without MIS] IF1 protein numbering) x-y, where x is an integer between 1 and 20 (or between 1 and 44, or between 1 and 84), and y is an integer between 40 and 85 (or between 40 and 85, or between 2 and 85) [different values of x and/or y are different embodiments; within their aforementioned range constraints, all possible combinations of x and y integer values are contemplated];
[0992] (xiii) IF1 protein/fragment (or sequence variant thereof) component/entirety comprises (or consists of) an IF1 protein fragment selected from a group comprising (using “mature” [without MIS] IF1 protein numbering): 1-84, 2-84, 3-84, 4-84, 5-84, 6-84, 7-84, 8-84, 9-84, 10-84, 11-84, 12-84, 13-84, 14-84, 15-84, 16-84, 17-84, 18-84, 19-84, 20-84, 21-84, 22-84, 23-84, 24-84, 25-84, 26-84, 27-84, 28-84, 29-84, 30-84, 31-84, 32-84, 33-84, 34-84, 35-84, 36-84, 37-84, 38-84, 39-84, 40-84, 41-84, 42-84, 43-84, 44-84, 45-84, 46-84, 47-84, 48-84, 49-84, 50-84, 51-84, 52-84, 53-84, 54-84, 55-84, 56-84, 57-84, 58-84, 59-84, 60-84, 61-84, 62-84, 63-84, 64-84, 65-84, 66-84, 67-84, 68-84, 69-84, 70-84, 71-84, 72-84, 73-84, 74-84, 75-84, 76-84, 77-84, 78-84, 79-84, 80-84, 81-84, 82-84, 83-84, OR a sub-sequence/fragment of one of these aforementioned fragments;
[0993] (xiv) IF1 protein/fragment (or sequence variant thereof) component/entirety comprises (or consists of) an IF1 protein fragment selected from a group comprising: IF1 protein residues {using “mature” [without MIS] IF1 protein numbering}: 14-47, 13-47, 12-47, 11-47, 10-47, 9-47, 8-47, 7-47, 6-47, 5-47, 4-47, 3-47, 2-47, 1-47, 14-48, 14-46, 14-45, 14-44, 14-43, 14-42, 13-48, 13-46, 13-45, 13-44, 13-43, 13-42, 12-48, 12-46, 12-45, 12-44, 12-43, 12-42, 11-48, 11-46, 11-45, 11-44, 11-43, 11-42, 10-48, 10-46, 10-45, 10-44, 10-43, 10-42, 42-58, 42-59, 1-56, 1-57, 1-58, 1-59, 1-60, 10-56, 10-57, 10-58, 10-59, 10-60, 14-60, 10-84, 14-84, 18-84, 10-50, 1-45, 42-56, 42-47, 48-56, 49-55;
[0994] (xv) IF1 protein/fragment (or sequence variant thereof) component/entirety comprises (or consists of) IF1 protein residues [preferably from a species with a maximal lifespan at least as long as Bos taurus, more preferably from a very long-lived mammal e.g. human, or (more preferred) blue or bowhead whale] (using “mature” [without MIS] IF1 protein numbering): one or more of (or sequence variant thereof) 10-47, 13-47, 14-47, 1-56, 1-57, 1-58, 1-59, 1-60, 10-56, 10-57, 10-58, 10-59, 10-60, preferably wherein, if the 14^{th} residue isn't alanine, it is substituted to be alanine;
[0995] (xvi) IF1 protein/fragment (or sequence variant thereof) component/entirety comprises (or consists of) human IF1 protein residues (using “mature” [without MIS] IF1 protein numbering): one or more of (or sequence variant thereof) 10-47, 13-47, 14-47, 1-56, 1-57, 1-58, 1-59, 1-60, 10-56, 10-57, 10-58, 10-59, 10-60, preferably with a S14A substitution;
[0996] (xvii) IF1 protein/fragment (or sequence variant thereof) component/entirety comprises (or consists of) whale (non-limiting e.g. selected from a group comprising bowhead, fin, blue, humpback, killer, sperm, gray, Cuvier's beaked, long-finned pilot whale) IF1 protein residues (using “mature” [without MIS] IF1 protein numbering): one or more of (or sequence variant thereof) 10-47, 13-47, 14-47, 1-56, 1-57, 1-58, 1-59, 1-60, 10-56, 10-57, 10-58, 10-59, 10-60, preferably wherein, if the 14^{th} residue isn't alanine, it is substituted to be so;
[0997] (xviii) IF1 protein/fragment (or sequence variant thereof) component/entirety comprises (or consists of) blue whale IF1 protein residues (using “mature” [without MIS] IF1 protein numbering): one or more of (or sequence variant thereof) 10-47, 13-47, 14-47, 1-56, 1-57, 1-58, 1-59, 1-60, 10-56, 10-57, 10-58, 10-59, 10-60, preferably with a T14A substitution;
[0998] (xix) IF1 protein/fragment (or sequence variant thereof) component/entirety comprises (or consists of) bowhead whale IF1 protein residues (using “mature” [without MIS] IF1 protein numbering): one or more of (or sequence variant thereof) 10-47, 13-47, 14-47, 1-56, 1-57, 1-58, 1-59, 1-60, 10-56, 10-57, 10-58, 10-59, 10-60;
[0999] (xx) IF1 protein/fragment (or sequence variant thereof) component/entirety comprises (or consists of) mammal/Bos Taurus/rodent/mouse/rat/rabbit IF1 protein residues (using “mature” [without MIS] IF1 protein numbering): one or more of (or sequence variant thereof) 10-47, 13-47, 14-47, 1-56, 1-57, 1-58, 1-59, 1-60, 10-56, 10-57, 10-58, 10-59, 10-60, 42-58, 42-59;
[1000] (xxi) IF1 protein/fragment (or sequence variant thereof) component/entirety comprises (or consists of) IF1 protein residues (using “mature” [without MIS] IF1 protein numbering): 42-58 or 42-59 (or sequence variant thereof);
[1001] (xxii) IF1 protein/fragment (or sequence variant thereof) component/entirety comprises (or consists of) human IF1 protein residues (using “mature” [without MIS] IF1 protein numbering): 42-58 or 42-59 (or sequence variant thereof), optionally with one or more of E51N, V54S, K57V substitutions;
[1002] (xxiii) IF1 protein/fragment (or sequence variant thereof) component/entirety comprises (or consists of) IF1 protein fragment shorter than 40 (or 35, or 30, or 25, or 20, or 15, or 10, or 5) amino acids, which contains H49 residue (or sequence variant thereof);
[1003] (xxiv) IF1 protein/fragment (or sequence variant thereof) component/entirety comprises (or consists of) short-living mammal (e.g. rodent, e.g. mouse) IF1 protein fragment shorter than 40 (or 35, or 30, or 25, or 20, or 15, or 10, or 5) amino acids, which contains H49 residue (or sequence variant thereof);
[1004] (xxv) IF1 protein/fragment (or sequence variant thereof) component/entirety comprises (or consists of) IF1 protein fragment (or sequence variant thereof) from a species that will be administered with the peptide/protein (and/or composition thereof);
[1005] (xxvi) IF1 protein/fragment (or sequence variant thereof) component/entirety comprises (or consists of) IF1 protein fragment (or sequence variant thereof) from a species with a maximal lifespan at least as long as Bos taurus, more preferably from a very long-lived mammal e.g. human, or (more preferred) blue or bowhead whale;
[1006] (xxvii) IF1 protein/fragment (or sequence variant thereof) component/entirety comprises (or consists of) IF1 protein fragment (or sequence variant thereof) from a mammal species with a maximal lifespan at least as short as mouse;
[1007] (xxviii) IF1 protein/fragment (or sequence variant thereof) component/entirety comprises (or consists of) married/combined fragment(s) and/or residue(s) of IF1 protein sequences from two or more different species, preferably wherein at least one of these species has a high maximal lifespan, preferably equal to or longer than human e.g. human, bowhead or blue whale, more preferably longer than human e.g. bowhead or blue whale;
[1008] (xxix) modified at its N- and/or C-terminal ends, optionally amidation/esterification of the C-terminus and/or acylation (e.g. acetylation) of the N-terminus;
[1009] (xxx) at least one IF1 protein/fragment (or sequence variant thereof), and/or IF1 protein/fragment (or sequence variant thereof) containing fusion protein, has a fatty acid (optionally linear or branched, saturated or unsaturated, containing 2 to 100 carbon atoms, more preferably from 2 to 25 carbon atoms; or derivative thereof) acylated to its N-terminus, non-limiting e.g. myristoyl/palmitoyl/stearoyl group conjugated to N-terminus;
[1010] (xxxi) a sequence, containing a number (integer selected from between 1 and 8) of amino acid residues (optionally wherein one or more are hydrophobic {optionally at least as hydrophobic as phenylalanine}, and/or one or more are positively charged {e.g. are lysine and/or arginine}, and/or one or more are reasonably hydrophobic with an ability to adopt a positive charge {e.g. histidine}), is peptide-bonded to the N-terminus, optionally wherein a fatty acid (or a derivative thereof) is conjugated/acylated to the resultant N-terminus of this fusion protein, and/or conjugated/acylated to the side-chain of one or more of these additional amino acid residues, optionally wherein at least one of these additional residues is a lysine, and a fatty acid is conjugated/acylated to its side-chain (optionally via a “spacer” moiety, which can be for non-limiting example, an amino acid(s) [e.g. L-γ-glutamic acid] or a dipeptide(s), or L-γ-glutamic acid and two OEG {8-amino-3,6-dioxaoctanoic acid} units), optionally wherein at least one of these added residues is cysteine, and a cholesterol derivative (e.g. cholesterol modified with a cysteine-reactive 2-bromoacetyl moiety) or fatty acid derivative (e.g. [hydrogen atoms not shown]: S—C—C(COOH)—N—C(O)—(C)ₙ wherein n is between 2 and 100, preferably between 2 and 25) is conjugated to its side-chain by a disulphide bond, preferably wherein this added sequence only has one lipophilic (fatty acid/cholesterol or derivative thereof) moiety attached in total, wherein a preferred fatty acid is linear or branched, saturated or unsaturated, containing between 2 to 100 carbon atoms, more preferably between 2 to 25 carbon atoms, optionally wherein an attached fatty acid is a myristoyl/palmitoyl/stearoyl group;
[1011] (xxxii) at least one cysteine residue in the amino acid sequence, optionally inserted/substituted into the sequence, optionally a cysteine present or substituted into the correspondent position to the (using “mature” [without MIS] IF1 protein numbering) 37^{th} amino acid position of the IF1 protein/fragment (or sequence variant thereof) [incidentally, gray whale IF1 protein has a cysteine residue in this position], which has a cholesterol derivative (e.g. cholesterol modified with a cysteine-reactive 2-bromoacetyl moiety) or a fatty acid (or derivative thereof) conjugated to it, preferably via a disulphide bond, optionally wherein the fatty acid derivative is [hydrogen atoms not shown]: S—C—C(COOH)—N—C(O)—(C)ₙ wherein n is between 2 and 100, preferably between 2 and 25, wherein (C)ₙ can be linear or branched, saturated or unsaturated;
[1012] (xxxiii) part(s) or all is cyclized, in one or more cycles;
[1013] (xxxiv) part(s) or all is bicyclic via attachment to a scaffold(s), optionally rendered bicyclic by judicious insertion of cysteine residues which confer attachment to a scaffold structure by thioether and/or disulphide bonds;
[1014] (xxxv) N^{α}-alkylated (e.g. N^{α}-methylated) at one or more places;
[1015] (xxxvi) contains one or more corresponding (to its sequence) D-amino acids;
[1016] (xxxvii) contains one or more retroinverse regions, or all of it is retroinverse;
[1017] (xxxviii) IF1 protein/fragment (or sequence variant thereof) component/entirety is retroinverse;
[1018] (xxxix) at least one of its carboxylic groups is esterified, optionally such that one or more of its carboxyl (COOH) groups is replaced by the group (or analogue thereof):

[chemical structure]

wherein R_{A} is (independently at each point of use) an alkyl or alkoxy (optionally at the para position on the indicated phenyl ring) or halogen, n is between 0 and 3, R is an alkyl, alkenyl, alkynyl group or hydrogen, R_{M} is an alkyl, alkenyl, alkynyl, cycloalkyl, aryl, or arylalkyl group which is optionally substituted with one or more alkyl, alkoxy, aryl, alkylaryl, halogen, haloalkyl, or haloalkoxy group, for example:

[chemical structure]

[1019] An IF1 protein/fragment (or sequence variant thereof), or fusion protein thereof, according to claim 4 wherein (from a sub-list(s) and or the overall list) x or more aspects/features/descriptors/modifications are true of it, wherein x is an integer selected from the group comprising: 2, 3, 4, 5, 6, 7, 8, 9, 10, 11, 12, 13, 14, 15, 16, 17, 18, 19, 20 [different values of x are different embodiments].

[1020] A fusion protein according to Claim 12 comprising (or consisting of):
[1021] (i) at least one Mitochondrial Import Sequence (MIS) [for delivery into the mitochondrial matrix], optionally in the order (N-terminal shown first): [MIS]-[IF1 protein/fragment (or sequence variant thereof)]; or
[1022] (ii) at least one epitope/affinity tag and at least one MIS [for delivery into the mitochondrial matrix], optionally in the order (N-terminal shown first): [epitope/affinity tag]-[MIS]-[IF1 protein/fragment (or sequence variant thereof)]; or
[1023] (iii) at least one MIS [for delivery into the mitochondrial matrix] and at least one Cell Penetrating Peptide (CPP) sequence, optionally in the order (N-terminal shown first): [CPP]-[MIS]-[IF1 protein/fragment (or sequence variant thereof)]; or
[1024] (iv) at least one epitope/affinity tag and at least one MIS [for delivery into the mitochondrial matrix] and at least one CPP sequence, optionally in the order (N-terminal shown first): [epitope/affinity tag]-[CPP]-[MIS]-[IF1 protein/fragment (or sequence variant thereof)].

[1025] A fusion protein according to Claim 14, wherein one or more of the following applies to (is true of) part(s) or all of it (wherein all possible combinations are contemplated {including all possible combinations of elements/descriptors within, and across, different bullet points} except those that are mutually exclusive):
[1026] (i) produced/isolated/purified/substantially purified/partially purified;
[1027] (ii) associated with a pharmaceutically/cosmetically acceptable salt[s];
[1028] (iii) Mitochondrial Import Sequence (MIS) is the same that a species uses for one or more of its proteins that it transports from the cytoplasm into the mitochondrial matrix, optionally wherein the MIS is the same that a species uses for its native IF1 protein;
[1029] (iv) MIS is that for an IF1 protein from human or mouse;
[1030] (v) MIS and IF1 protein/fragment (or sequence variant thereof) are from different species;
[1031] (vi) MIS and IF1 protein/fragment (or sequence variant thereof) are from different species, optionally wherein the former is from a species that will be administered with the fusion protein and the latter is from a different species, preferably from a longer-living species than the subject (to be administered) species, preferably from a very long-lived species (e.g. bowhead or blue whale);
[1032] (vii) MIS and IF1 protein/fragment (or sequence variant thereof) are from same species;
[1033] (viii) IF1 protein/fragment is from Bos taurus/human/bowhead whale/blue whale/mouse/rat/naked mole rat (or sequence variant thereof), MIS is from a different species;
[1034] (ix) MIS is from human, and IF1 protein/fragment (or sequence variant thereof) is from a different species, optionally Bos taurus/whale/bowhead whale/blue whale/mouse/rat/naked mole rat;
[1035] (x) MIS is from mouse, and IF1 protein/fragment (or sequence variant thereof) is from a different species, optionally Bos taurus/whale/bowhead whale/blue whale/rat/naked mole rat;
[1036] (xi) MIS is from a species, and IF1 protein/fragment (or sequence variant thereof) is from a longer-living species (higher maximal lifespan);
[1037] (xii) MIS is from a species, and IF1 protein fragment (or sequence variant thereof) is from a shorter-living species (lower maximal lifespan);
[1038] (xiii) MIS is from a species, and IF1 protein fragment (or sequence variant thereof) has more residues from the N-terminal than C-terminal half of IF1 protein, preferably from a longer-living species (higher maximal lifespan);
[1039] (xiv) MIS is from a species, and IF1 protein fragment (or sequence variant thereof) has more residues from the C-terminal than N-terminal half of IF1 protein, preferably from a shorter-living species (lower maximal lifespan);
[1040] (xv) MIS is from a species, and the IF1 protein fragment (or sequence variant thereof) is from a different species, preferably a longer-living species (higher maximal lifespan), and comprises (or consists of) {using “mature” [without MIS] IF1 protein numbering} one or more of (or sequence variant thereof) 10-47, 13-47, 14-47, 1-56, 1-57, 1-58, 1-59, 1-60, 10-56, 10-57, 10-58, 10-59, 10-60, 42-58, 42-59 residues;
[1041] (xvi) MIS is from a species, and the IF1 protein fragment (or sequence variant thereof) is from a different species, preferably a shorter-living species (lower maximal lifespan), wherein it is shorter than 40 (or 35, or 30, or 25, or 20, or 15, or 10) amino acids, and contains the H49 residue (using “mature” [without MIS] IF1 protein numbering);
[1042] (xvii) is (in total or in part[s]) retroinverse, optionally wherein the Mitochondrial Import Sequence (MIS) is not retroinverse;
[1043] (xviii) MIS is excluded from being retroinverse, but other part(s) can be;
[1044] (xix) MIS is not retroinverse but the IF1 protein/fragment (or sequence variant thereof) is retroinverse (in entirety or in part[s]);
[1045] (xx) MIS is not retroinverse but the IF1 protein/fragment (or sequence variant thereof) and/or Cell Penetrating Peptide (CPP) sequence is retroinverse (in entirety or in part[s]);
[1046] (xxi) CPP component(s) is one or more of a Tat sequence(s) (and/or sequence variant(s) thereof of the art), Penetratin sequence(s) (and/or sequence variant(s) thereof of the art), poly-Arginine sequence(s) (and/or sequence variant(s) thereof of the art), optionally YGRKKRRQRRRG [SEQ ID NO:446] (optionally wherein the terminal glycine is absent), optionally RRRRRRRG [SEQ ID NO:461] (optionally wherein the terminal glycine is absent), optionally wherein one or more of the amino acids can be corresponding D-amino acids, optionally wherein part(s) or all of the CPP component(s) is retroinverse;
[1047] (xxii) epitope/affinity tag component(s) comprises (or consists of) one or more of poly-histidine, any of SEQ ID NO:130 to SEQ ID NO:144 e.g. HHHHHHDYDDDDK [SEQ ID NO:136];
[1048] (xxiii) CPP component(s) is flanked on one or both sides, optionally just on its C-terminal end (which is concatenated to the MIS component), by zero or more glycine and/or proline residues, optionally between 0 and 5 residues, optionally 1 such residue;
[1049] (xxiv) CPP component(s) is bound to the remainder of the fusion protein by a disulphide (by judicious insertion and/or substitution of cysteine residues) or peptide bond(s), or mixture thereof (i.e. some of the IF1 fusion proteins have their CPP bound by a disulphide bond, others by a peptide bond), optionally wherein a cysteine residue is at the C-terminal end of the CPP, which is disulphide bonded to an inserted/substituted N-terminal/internal cysteine in the MIS or IF1 protein/fragment (or sequence variant thereof) component of the fusion protein, optionally wherein the cysteine is (using “mature” [without MIS] IF1 protein numbering) present at (in legacy to the IF1 protein/fragment, or sequence variant thereof, used e.g. if from gray whale), or substituted into, the 37^{th} position;
[1050] (xxv) modified at its N- and/or C-terminal ends, optionally amidation/esterification of the C-terminus and/or acylation (e.g. acetylation) of the N-terminus;
[1051] (xxvi) at least one IF1 protein/fragment (or sequence variant thereof), and/or IF1 protein/fragment (or sequence variant thereof) containing fusion protein, has a fatty acid (optionally linear or branched, saturated or unsaturated, containing 2 to 100 carbon atoms, more preferably from 2 to 25 carbon atoms; or derivative thereof) conjugated/acylated to its N-terminus, non-limiting e.g. myristoyl/palmitoyl/stearoyl group acylated to N-terminus;
[1052] (xxvii) a sequence, containing a number (integer selected from between 1 and 8) of amino acid residues (optionally wherein one or more are hydrophobic {optionally at least as hydrophobic as phenylalanine}, and/or one or more are positively charged {e.g. are lysine and/or arginine}, and/or one or more are reasonably hydrophobic with an ability to adopt a positive charge {e.g. histidine}), is peptide-bonded to the N-terminus, optionally wherein a fatty acid (or a derivative thereof) is conjugated/acylated to the resultant N-terminus of this fusion protein, and/or conjugated/acylated to the side-chain of one or more of these additional amino acid residues, optionally wherein at least one of these additional residues is a lysine, and a fatty acid is conjugated/acylated to its side-chain (optionally via a “spacer” moiety, which can be for non-limiting example, an amino acid(s) [e.g. L-γ-glutamic acid] or a dipeptide(s), or L-γ-glutamic acid and two OEG {8-amino-3,6-dioxaoctanoic acid} units), optionally wherein at least one of these added residues is cysteine, and a cholesterol derivative (e.g. cholesterol modified with a cysteine-reactive 2-bromoacetyl moiety) or fatty acid derivative (e.g. [hydrogen atoms not shown]: S—C—C(COOH)—N—C(O)—(C)ₙ wherein n is between 2 and 100, preferably between 2 and 25) is conjugated to its side-chain by a disulphide bond, preferably wherein this added sequence only has one lipophilic (fatty acid/cholesterol or derivative thereof) moiety attached in total, wherein a preferred fatty acid is linear or branched, saturated or unsaturated, containing between 2 to 100 carbon atoms, more preferably between 2 to 25 carbon atoms, optionally wherein an attached fatty acid is a myristoyl/palmitoyl/stearoyl group;
[1053] (xxviii) at least one cysteine residue in the amino acid sequence, optionally inserted/substituted into the sequence, optionally a cysteine present or substituted into the correspondent position to the (using “mature” [without MIS] IF1 protein numbering) 37^{th} amino acid position of the IF1 protein/fragment (or sequence variant thereof) [incidentally, gray whale IF1 protein has a cysteine residue in this position], which has a cholesterol derivative (e.g. cholesterol modified with a cysteine-reactive 2-bromoacetyl moiety) or a fatty acid (or derivative thereof) conjugated to it, preferably via a disulphide bond, optionally wherein the fatty acid derivative is [hydrogen atoms not shown]: S—C—C(COOH)—N—C(O)—(C)ₙ wherein n is between 2 and 100, preferably between 2 and 25, wherein (C)ₙ can be linear or branched, saturated or unsaturated;
[1054] (xxix) part(s) or all is cyclic, optionally bicyclic, optionally where it is rendered bicyclic by judicious insertion of cysteine residues which confer attachment to a scaffold structure by thioether and/or disulphide bonds, optionally wherein, for a IF1 protein/fragment (or sequence variant thereof) containing fusion protein, if present, the CPP sequence(s) (optionally a CPP sequence(s) with precedent use in a bicyclic form from the literature) is confined to one cycle, and the MIS and IF1 protein/fragment (or sequence variant thereof) is confined to the other cycle of a bicyclic structure, optionally wherein the sequence attached to the scaffold is of the form (where IF1 below can refer to a “mature” IF1 protein(s) and/or a IF1 sequence variant(s)/fragment(s)/fragment sequence variant(s) thereof): Cys-CPP-Cys-MIS-IF1-Cys;
[1055] (xxx) N^{α}-alkylated (e.g. N^{α}-methylated) at one or more places;
[1056] (xxxi) comprises (or consists of) one or more corresponding (to its sequence) D-amino acids;
[1057] (xxxii) is (in total or in part[s]) retroinverse, optionally wherein if it contains a Mitochondrial Import Sequence (MIS), this is not retroinverse, optionally wherein the Mitochondrial Import Sequence (MIS) is not retroinverse and the IF1 protein/fragment (or sequence variant thereof) and/or Cell Penetrating Peptide (CPP) sequence is retroinverse (in entirety or in part[s]);
[1058] (xxxiii) at least one of its carboxylic groups is esterified, optionally such that one or more of its carboxyl (COOH) groups is replaced by the group (or analogue thereof):

[chemical structure]

[1059] wherein RA is (independently at each point of use) an alkyl or alkoxy (optionally at the para position on the indicated phenyl ring) or halogen, n is between 0 and 3, R is an alkyl, alkenyl, alkynyl group or hydrogen, R_{M} is an alkyl, alkenyl, alkynyl, cycloalkyl, aryl, or arylalkyl group which is optionally substituted with one or more alkyl, alkoxy, aryl, alkylaryl, halogen, haloalkyl, or haloalkoxy group, for example:

[chemical structure]

[1060] A (optionally produced/isolated/purified/substantially purified/partially purified) peptide/protein comprising (or consisting of) at least one sequence selected from SEQ ID NO:166 to SEQ ID NO:438, or a fragment thereof (for non-limiting example wherein the epitope/affinity tag component [if present] is absent, and/or the Cell Penetrating Peptide component [if present] is absent), or concatenated fragments thereof, and/or a sequence variant(s) thereof (which is very preferably functional {can inhibit/reduce F₁F₀ ATP hydrolysis in a cell and/or in a Sub-Mitochondrial Particle [SMP] assay of F₁F₀ ATP hydrolysis}, optionally incorporating one or more conservative substitutions), optionally wherein one or more of the listed options in one or more of Claims 12-15 apply to the sequence[s] (non-limiting e.g. associated with a pharmaceutically/cosmetically acceptable salt[s], esterified, modified at N- and/or C-terminal ends, N-terminal pre-sequence attached, cholesterol derivative(s) and/or fatty acid(s) [or derivative(s) thereof] attached, cyclized, bicyclic, corresponding D-amino acid at one or more places, one or more parts are retroinverse, N^{α}-alkylated {e.g. N^{α}-methylated} etc. [all combinations contemplated except those that are mutually exclusive]).

[1061] A (optionally produced/isolated/purified/substantially purified/partially purified) modified (optionally conservatively), and functional (can inhibit/reduce F₁F₀ ATP hydrolysis in a cell and/or in a Sub-Mitochondrial Particle [SMP] assay of F₁F₀ ATP hydrolysis), sequence variant(s) of a protein(s)/peptide(s) of one or more of Claims 11-16.

### Polynucleotide, Vector, Cell, Gene Therapy, Transgenic Organism, Medicament Thereof

[1062] A (optionally produced/isolated/purified/substantially purified/partially purified) polynucleotide, optionally cDNA, encoding at least one peptide/protein sequence from one or more of Claims 11-17,
[1063] optionally wherein one or more of the codons, optionally all the codons, used for each amino acid are the most (or one of the most) frequently used for each amino acid in the codon bias of at least one species that will express the polynucleotide;
[1064] and/or
[1065] wherein the polynucleotide comprises (or consists of) one or more sequences selected from SEQ ID NO:1426 to SEQ ID NO:1684,
   [1066] or a pharmaceutical/cosmetic composition thereof.

[1067] A vector/plasmid of the art (non-limiting e.g. liposome, nanoparticle, lipid nanoparticle [LNP] etc.), or a pharmaceutical/cosmetic composition thereof, comprising at least one polynucleotide of Claim 18; one or more vectors/plasmids (of the art) each comprising at least one polynucleotide of Claim 18.

[1068] A cell comprising at least one vector/plasmid of Claim 19; one or more cells each comprising at least one vector/plasmid of Claim 19; optionally wherein the cell(s) can be bacterial (non-limiting e.g. E. Coli), yeast (non-limiting e.g. Saccharomyces cerevisiae), immortalized mammalian (non-limiting e.g. human) cell line, insect cell, or other cell type(s) used for recombinant protein expression in the art.

[1069] A method for producing/manufacturing a protein(s)/peptide(s) from Claims 11-17 comprising culturing (e.g. in/atop a nutrient medium) one or more cells of Claim 20 under conditions suitable for the expression of at least one polynucleotide of Claim 18, and recovering said protein(s)/peptide(s) therefrom, optionally by way of an epitope/affinity tag sequence component, optionally wherein this tag is then removed, optionally by the epitope/affinity tag sequence being connected to one end of the desired peptide/protein sequence(s), optionally the N-terminal end, by a cleavable linker sequence that is cleaved.

[1070] A gene therapy/vector of the art, or a pharmaceutical/cosmetic composition thereof, comprising at least one polynucleotide of Claim 18, optionally a gene therapy/vector of the art for (disproportional) delivery to:
[1071] (i) one or more skin/scalp cells; and/or
[1072] (ii) one or both eyes/ears; and/or
[1073] (iii) one or more brain regions and/or one or more brain cell/neuron/glia types/populations; and/or
[1074] (iv) a population(s) of cells/body region(s), e.g. a population of brain cells/brain region(s)/eye cells, that tends to age faster, and/or lose optimal function earlier in life, than other parts of the body (in that species), optionally wherein this loss is a drive to an age-correlated disease(s)/disorder(s) e.g. a neurodegenerative disease (e.g. Parkinson's disease), e.g. an age-correlated eye disorder(s)/disease(s) such as Age-related Macular Degeneration (AMD);
[1075] optionally wherein the gene therapy vector is an Adeno-Associated Virus (AAV), optionally AAV9 or AAV2;
[1076] especially preferred is the use of a gene therapy vector that is used in an FDA/EMA approved gene therapy and/or that has passed Phase I clinical trialing or/and otherwise proven safe in humans.

[1077] A transgenic organism, preferably/restrictively a non-human transgenic organism, optionally a transgenic microorganism, optionally a non-human transgenic mammal, optionally a transgenic mouse, containing at least one polynucleotide of Claim 18.

[1078] Use of at least one peptide/protein sequence of Claims 11-17, and/or at least one pharmaceutically/cosmetically acceptable salt, solvate, hydrate, prodrug, liposome, nanoparticle (e.g. lipid nanoparticle, LNP) or other vector of the art thereof, and/or at least one polynucleotide of Claim 18 [and/or at least one vector(s) of Claim 19, and/or gene therap(y/ies) of Claim 22, and/or at least one cell(s) of Claim 20, and/or at least one transgenic organism(s) of Claim 23] in/for the manufacture of a medicament or a pharmaceutical/cosmetic composition;
[1079] use of at least one peptide/protein sequence of Claims 11-17, and/or at least one pharmaceutically/cosmetically acceptable salt, solvate, hydrate, prodrug, liposome, nanoparticle (e.g. lipid nanoparticle, LNP) or other vector of the art thereof, and/or at least one polynucleotide of Claim 18 [and/or at least one vector(s) of Claim 19, and/or at least one gene therap(y/ies) of Claim 22, and/or at least one cell(s) of Claim 20, and/or at least one transgenic organism(s) of Claim 23] in/for the manufacture of a medicament for the treatment/amelioration/prevention/combat/reversal/slowing/delaying of aging (and/or increasing lifespan and/or healthspan), and/or an unwanted/undesirable aspect(s)/sign(s) of aging and/or an age-correlated (risk of incidence increases with subject age) disorder(s)/disease(s) (e.g. a neurodegenerative disease[s]), in a subject;
[1080] use of at least one peptide/protein sequence of Claims 11-17, and/or at least one pharmaceutically/cosmetically acceptable salt, solvate, hydrate, prodrug, liposome, nanoparticle (e.g. lipid nanoparticle, LNP) or other vector of the art thereof, and/or at least one polynucleotide of Claim 18 [and/or at least one vector(s) of Claim 19, and/or at least one gene therap(y/ies) of Claim 22, and/or at least one cell(s) of Claim 20, and/or at least one transgenic organism(s) of Claim 23] in/for the manufacture of a medicament/cosmetic/supplement for the treatment/amelioration/prevention/combat/reversal/slowing/delaying of skin/scalp aging and/or one or more signs of skin/scalp aging/photoaging/age-correlated damage (non-limiting e.g. lateral canthal lines (crow's feet), liver/age spot(s), wrinkle(s) [e.g. facial wrinkles], fine lines in the skin (e.g. around eyes and/or mouth), expression lines, dark circles/“bags” under the eyes, hair greying/loss etc.), optionally in a pharmaceutical/dermopharmaceutical/cosmetic/supplement composition/form of the art for topical/skin/scalp/transdermal (e.g. human skin/scalp) administration, optionally a cream/lotion/spray/gel/oil/liquid/foam/paste/aerosol/butter/patch/make-up/shampoo/soap thereof.

### Novel IF1 Proteins

[1081] A method of fusing fragment(s)/residue(s) of two or more different (from different species) IF1 proteins to generate a novel IF1 protein/fragment sequence, which is functional (it can inhibit/reduce F₁F₀ ATP hydrolysis e.g. inside a cell, preferably a eukaryote cell, and/or in a Sub-Mitochondrial Particle (SMP) assay of the art, which assays F₁F₀ ATP hydrolysis [functional in an SMP assay with native IF1 protein removed and/or present]), optionally/preferably with greater inhibitory activity at pH 8 than any of the contributing IF1 proteins, optionally wherein fragment(s)/residue(s) of the IF1 protein sequence of a longer living species (e.g. longer maximal lifespan) is substituted into the equivalent position(s) of the IF1 protein/fragment sequence of a shorter living species in order to generate a novel IF1 protein/fragment sequence, optionally wherein a consensus sequence (most commonly observed residue is incorporated at each position) is generated from IF1 protein sequences from a number of different long-lived species, to generate a novel IF1 protein/fragment sequence.

### Screening Method

[1082] Method of screening for least one IF1 protein fragment that can inhibit/reduce F₁F₀ ATP hydrolysis in a Sub-Mitochondrial Particle [SMP] assay of F₁F₀ ATP hydrolysis, at alkaline pH (e.g. pH 8), in which endogenous/native IF1 protein is not removed,
[1083] preferably wherein a number of different IF1 protein fragments are systematically tested, preferably by one or more of the following methods:
   [1084] (1) wherein the first IF1 protein fragment tested consists of the most C-terminal (last) residue of an IF1 protein (non-limiting e.g. of Bos taurus), the second fragment tested consists of the last two residues, the third fragment consists of the last three residues, the fourth fragment consists of the last four residues, and this testing is iterated in this fashion, adding a residue each time (optionally testing until the N-terminal end of the IF1 protein is reached, or stopping before this, optionally stopping once the 47^{th} or 42^{nd} residue [from the N-terminal end, using “mature” {without MIS} IF1 protein numbering] is reached, or when a residue nearby is reached); then, with each fragment found to have inhibition/reduction of F₁F₀ ATP hydrolysis activity, the fragment sequence is tested again but with its most C-terminal (last) absent, and then again iteratively, each time with one more amino acid removed from its C-terminal end, until the activity is lost or until there are no residues remaining;
   [1085] (2) wherein the first IF1 protein fragment tested consists of IF1 protein residues (using “mature” [without MIS] IF1 protein numbering): 42-58, and then in the next test, the 43-58 fragment is tested, then 44-58, then 45-58 etc., wherein with each new test, the fragment has one less amino acid at its N-terminal end, until there are no more fragments left to test (the same method but coming instead from the C-terminal end is contemplated also);
[1086] optionally wherein one or more of the following apply (wherein all possible combinations are contemplated {including all possible combinations of elements/descriptors within, and across, different bullet points} except those that are mutually exclusive):
   [1087] (i) the SMPs are from a mammal;
   [1088] (ii) the SMPs are from a species that is to be administered with the IF1 protein fragment(s) (and/or sequence variant(s) thereof), or fusion protein(s) thereof, selected by the assay, and/or from a closely/not too distantly related species (e.g. if humans are to be administered, the SMPs can be from bovine);
   [1089] (iii) the assayed IF1 protein fragment(s) (and/or sequence variant(s) thereof) is/are from a mammal;
   [1090] (iv) the IF1 protein fragment(s) (and/or sequence variant(s) thereof) assayed is/are from a species that is to be administered with the IF1 fragment(s), or fusion protein(s) thereof, selected by the assay, and/or from a closely/not too distantly related species;
   [1091] (v) the IF1 protein fragment(s) (and/or sequence variant(s) thereof) is from a short(er)-living species, but preferably a species not too evolutionarily divergent from a species that is to be administered with the IF1 fragment(s) (and/or sequence variant(s) thereof), or fusion protein(s) thereof, selected by the assay, wherein shorter living mammals have more strongly/tightly joined IF1 tetramers (and higher oligomers), wherein they are bound to each other in their C-terminal halves, and so a C-terminal IF1 fragment from a shorter-living mammal binds a C-terminal part of an IF1 protein more tightly (if the evolutionary distance between them isn't too great);
[1092] optionally wherein the method(s) is repeated with fragments from the IF1 protein of a different species, optionally wherein it is performed with fragments from the IF1 protein of a number of different species;
[1093] in an optional next step(s), for each of the selected peptides, or for only one or more of the most potent (e.g. low EC₅₀ against F₁F₀ ATP hydrolysis), an alanine scan is performed, wherein each residue position is iteratively substituted to alanine, and the ability to inhibit/reduce F₁F₀ ATP hydrolysis at alkaline pH (e.g. pH 8), in an SMP assay of F₁F₀ ATP hydrolysis (with endogenous IF1 protein present and not removed), is assayed each time, to identify key amino acid residues, and, by contrast, those that can be changed without (much) loss of activity (or that actually increase activity), wherein sequence variants with an amino acid changed at one or more of these positions are componentry to this disclosure.
[1094] also componentry are sequence variants wherein an amino acid(s) is changed to be a different amino acid that a different species has at the equivalent position in their IF1 protein;
[1095] functional sequence variants of all these fragments are contemplated;
[1096] optionally wherein each IF1 protein fragment(s) (or sequence variant(s) thereof) selected by this method (i.e. shown to reduce F₁F₀ ATP hydrolysis) is tested in an SMP assay of F₁F₀ ATP synthesis, optionally wherein if it appreciably reduces F₁F₀ ATP synthesis also, it is discounted.

[1097] A Peptide Identifiable by a Method of Claim 26.

[1098] A method of Claim 26 wherein it is not an IF1 protein fragment(s) that is assayed but instead a fragment(s) (e.g. less than one or more of 60, 50, 40, 20, 10, 5 amino acids long) of a protein(s) found in ATP synthase (and/or sequence variant(s) thereof), or a concatenation(s) of fragments from same/different proteins found in ATP synthase (and/or sequence variant(s) thereof), optionally from β sub-unit of F₁, optionally wherein an ATP synthase sequence(s) that some or all of the C-terminal part of IF1 protein binds (when IF1 protein inhibits F₁F₀ ATP hydrolysis) is prioritized for testing (e.g. sequence(s) that some or all of the IF1 protein C-terminal half binds (e.g. that part after its 47h residue [using “mature” {without MIS} IF1 protein residue numbering])),
[1099] optionally wherein one or more of the following apply (wherein all possible combinations are contemplated {including all possible combinations of elements/descriptors within, and across, different bullet points} except those that are mutually exclusive):
   [1100] (i) the ATP synthase sequence(s) is from a mammal;
   [1101] (ii) the ATP synthase sequence(s) is from a species that is to be administered with the ATP synthase fragment(s), or fusion protein(s) thereof, selected by the assay, and/or from a closely/not too distantly related species;
[1102] optionally wherein each ATP synthase protein fragment(s) (or sequence variant(s) thereof) selected by this method (i.e. shown to reduce F₁F₀ ATP hydrolysis) is tested in an SMP assay of F₁F₀ ATP synthesis, optionally wherein if it appreciably reduces F₁F₀ ATP synthesis also, it is discounted.

### Fusion Proteins Thereof

[1103] A fusion protein (and/or a pharmaceutically/cosmetically acceptable salt, solvate, hydrate, prodrug, liposome, nanoparticle [e.g. lipid nanoparticle, LNP] or other vector of the art thereof) comprising
[1104] either a
[1105] (i) N-terminal Cell Penetrating Peptide (CPP) sequence(s) concatenated to a Mitochondrial Import Sequence(s) (MIS(s), preferably for an IF1 protein), or
[1106] (ii) N-terminal Mitochondrial Import Sequence(s) (MIS(s), preferably for an IF1 protein), concatenated to either a
   [1107] (a) (preferably “mature” i.e. without its MIS) novel IF1 protein(s)/fragment(s) selected by a method of Claim 25, or
   [1108] (b) IF1 protein fragment(s) (and/or sequence variant(s) thereof) selected by a method of Claim 26, or
   [1109] (c) ATP synthase fragment(s) (and/or sequence variant(s) thereof) selected by a method of Claim 28.
      Gene Therapy with ANY IF1 Protein/Fragment (or Sequence Variant Thereof)

[1110] A vector of the art for a polynucleotide, preferably a gene therapy vector of the art, optionally an Adeno-Associated Virus (AAV) [optionally AAV2 administered to the eye(s)], comprising at least one polynucleotide coding for at least one [any] IF1 protein/fragment
[1111] (or sequence variant thereof,
[1112] optionally wherein {using “mature” [without MIS] IF1 protein numbering} it has a H49K (or H49A or H49R) substitution and, if its 14^{th} residue is not alanine, it is substituted to be alanine),
[1113] optionally derived from that of a long lived mammal species (e.g. whale species [longer living species preferred e.g. bowhead or blue whale]) and/or long-lived reptile species e.g. a tortoise/turtle/terrapin etc.)
[1114] or a pharmaceutical/cosmetic composition thereof;
[1115] especially preferred is the use of a gene therapy vector that is used in an FDA/EMA approved gene therapy and/or that has passed Phase I clinical trialing or/and otherwise proven safe in humans.
   Medicament/Cosmetic/Supplement with ANY IF1 Protein/Fragment (or Sequence Variant Thereof)

[1116] Use of at least one (optionally produced/isolated/purified/substantially purified/partially purified) [any] IF1 protein/fragment (or sequence variant thereof), and/or a fusion protein(s) thereof (optionally containing a CPP sequence(s)), and/or at least one pharmaceutically/cosmetically acceptable salt, solvate, hydrate, prodrug, liposome, nanoparticle (e.g. lipid nanoparticle, LNP) or other vector of the art thereof, and/or at least one polynucleotide coding for at least one [any] IF1 protein/fragment (or sequence variant thereof) and/or a fusion protein(s) thereof (optionally containing a CPP sequence(s)) [and/or vector(s)/plasmid(s)/liposome/(s)/nanoparticle(s)/gene therap[y/ies] thereof, and/or cell(s)/transgenic cell(s)/transgenic organism(s) thereof], in/for the manufacture of a medicament or a pharmaceutical/cosmetic composition;
[1117] use of at least one (optionally produced/isolated/purified/substantially purified/partially purified) [any] IF1 protein/fragment (or sequence variant thereof), and/or fusion protein(s) thereof (optionally containing a CPP sequence(s)), and/or at least one pharmaceutically/cosmetically acceptable salt, solvate, hydrate, prodrug, liposome, nanoparticle (e.g. lipid nanoparticle, LNP) or other vector of the art thereof, and/or at least one polynucleotide coding for at least one [any] IF1 protein/fragment (or sequence variant thereof) and/or fusion protein(s) thereof (optionally containing a CPP sequence(s)) [and/or vector(s)/plasmid(s)/liposome(s)/nanoparticle(s)/gene therap[y/ies] thereof, and/or cell(s)/transgenic cell(s)/transgenic organism(s) thereof], in/for the manufacture of a medicament for the treatment/amelioration/prevention/combat/reversal/slowing/delaying of aging (and/or increasing lifespan and/or healthspan), and/or an unwanted/undesirable aspect(s)/sign(s) of aging and/or an age-correlated (risk of incidence increases with subject age) disorder(s)/disease(s) (e.g. a neurodegenerative disease[s]), in a subject;
[1118] use of at least one (optionally produced/isolated/purified/substantially purified/partially purified) [any] IF1 protein/fragment (or sequence variant thereof), and/or a fusion protein(s) thereof (optionally containing a CPP sequence(s)), and/or at least one pharmaceutically/cosmetically acceptable salt, solvate, hydrate, prodrug, liposome, nanoparticle (e.g. lipid nanoparticle, LNP) or other vector of the art thereof, and/or at least one polynucleotide coding for at least one [any] IF1 protein/fragment (or sequence variant thereof) and/or a fusion protein(s) thereof (optionally containing a CPP sequence(s)) [and/or vector(s)/plasmid(s)/liposome(s)/nanoparticle(s)/gene therap[y/ies] thereof, and/or cell(s)/transgenic cell(s)/transgenic organism(s) thereof], in/for the manufacture of a medicament/cosmetic/supplement for the treatment/amelioration/prevention/combat/reversal/slowing/delaying of skin/scalp aging and/or one or more signs of skin/scalp aging/photoaging/age-correlated damage (non-limiting e.g. lateral canthal lines (crow's feet), liver/age spot(s), wrinkle(s) [e.g. facial wrinkles], fine lines in the skin (e.g. around eyes and/or mouth), expression lines, dark circles/“bags” under the eyes, hair greying/loss etc.), optionally in a pharmaceutical/cosmetic/supplement composition of the art for topical/skin/scalp/transdermal (e.g. human skin/scalp) administration, optionally a cream/lotion/spray/gel/oil/liquid/foam/paste/aerosol/butter/patch/make-up/shampoo/soap thereof,
   [1119] optionally wherein one or more of the following apply to it (wherein all possible combinations are contemplated {including all possible combinations of elements/descriptors within, and across, different bullet points} except those that are mutually exclusive):
   [1120] (i) comprises at least one [any] IF1 protein (or sequence variant thereof) and at least one [any] IF1 protein fragment (or sequence variant thereof);
   [1121] (ii) comprises multiple different IF1 protein and/or IF1 protein fragment sequences, optionally wherein one or more are sequence variants, optionally wherein two or more are different (optionally overlapping) fragments from the same IF1 protein (from the same species) or from the same sequence variant thereof;
   [1122] (iii) at least one IF1 protein(s)/fragment(s) (or sequence variant thereof) is from a long-lived species (e.g. with a long maximal lifespan) e.g. from a long lived mammal species (e.g. whale species [longer living species preferred e.g. bowhead or blue whale]) and/or long-lived reptile species e.g. a tortoise/turtle/terrapin etc.;
   [1123] (iv) at least one IF1 protein(s)/fragment(s) (or sequence variant thereof) is from human.

[1124] A process for making a pharmaceutical/cosmetic/supplement composition/medicament of Claim 31 comprising combining an amount (preferably an effective amount e.g. a therapeutically/cosmetically effective amount) of at least one (optionally produced/isolated/purified/substantially purified/partially purified) [any] IF1 protein/fragment (or sequence variant thereof), and/or a fusion protein(s) thereof (optionally containing a CPP sequence(s)), optionally at least one pharmaceutically/cosmetically acceptable salt, solvate, hydrate, prodrug, liposome, nanoparticle (e.g. lipid nanoparticle, LNP) or other vector of the art thereof, and/or at least one polynucleotide coding for at least one [any] IF1 protein/fragment (or sequence variant thereof) and/or a fusion protein(s) thereof (optionally containing a CPP sequence(s)) [and/or vector(s)/plasmid(s)/liposome(s)/nanoparticle(s)/gene therap[y/ies] thereof, and/or cell(s)/transgenic cell(s)/transgenic organism(s) thereof], with a pharmaceutically/cosmetically acceptable vehicle(s).

### New Cosmetic/Therapeutic Methods

[1125] A method of treating/ameliorating/preventing/combating/reversing/slowing/delaying aging in a subject (and/or, in the subject, increasing their lifespan and/or healthspan and/or treating/ameliorating/preventing/combating/reversing/slowing/delaying an unwanted/undesirable aspect(s)/sign(s) of aging and/or one or more of an age-correlated disorder(s)/disease(s)/damage(s)/sign(s)/decline in function(s)/decline in aesthetic(s)) wherein the method comprises reducing F₁F₀ ATP hydrolysis in the subject.

[1126] A method of Claim 33 wherein F₁F₀ ATP hydrolysis is reduced in the subject by inhibiting F₁F₀ ATP hydrolysis in the subject.

[1127] A method of Claim 33 wherein F₁F₀ ATP hydrolysis is reduced in the subject by administering at least one F₁F₀ ATP hydrolysis inhibitor to the subject.

[1128] A method of treating/ameliorating/preventing/combating/reversing/slowing/delaying aging in a subject (and/or, in the subject, increasing their lifespan and/or healthspan and/or treating/ameliorating/preventing/combating/reversing/slowing/delaying an unwanted/undesirable aspect(s)/sign(s) of aging and/or one or more of an age-correlated disorder(s)/disease(s)/damage(s)/sign(s)/decline in function(s)/decline in aesthetic(s)) wherein the method comprises increasing the amount of (at least one type of) IF1 protein (and/or sequence variant(s) thereof) in the subject.

[1129] A method of Claim 36, wherein at least some of the extra IF1 protein (and/or sequence variant thereof) has a Mitochondrial Import Sequence (MIS) attached (preferably by peptide bond to its N-terminal end) and/or at least some of the extra IF1 protein (and/or sequence variant thereof) doesn't have a Mitochondrial Import Sequence (MIS) attached.

[1130] A method of Claim 36, wherein at least some of the extra IF1 protein (and/or sequence variant thereof) has a Mitochondrial Import Sequence (MIS) attached (preferably by peptide bond to its N-terminal end) that is the same as an MIS that the subject's/subject's species' uses to transport one or more of its endogenous/native proteins from the cytoplasm to the mitochondrial matrix, optionally the MIS that the subject's/subject's species' uses for its endogenous/native IF1 protein.

[1131] A method of Claim 36 wherein at least some of the extra IF1 protein has the same sequence as the subject's/subject's species' endogenous/native IF1 protein.

[1132] A method of Claim 36 wherein at least some of the extra IF1 protein is an IF1 protein sequence from a different species, optionally a longer-living (higher maximal lifespan) species than the subject's species, optionally a very long-lived species (high maximal lifespan).

[1133] A method of Claim 36, wherein at least some of the extra IF1 protein is an IF1 protein (from same or different species than the subject, optionally from a longer-living species, optionally from a very long-lived species) sequence variant with (using mature {without MIS} IF1 protein residue numbering) lysine or alanine or arginine as its 49^{th} residue, and/or alanine as its 14^{th} residue.

[1134] A method of Claim 36, wherein the increase in the amount of (at least one type of) IF1 protein (and/or sequence variant thereof) is because of at least one IF1 protein (and/or sequence variant thereof) coding polynucleotide sequence (e.g. an ATPIF1 gene or sequence variant thereof), and/or vector(s)/plasmid(s)/liposome(s)/nanoparticle(s)/gene therap(y/ies) thereof [and/or cell(s) thereof], or at least one pharmaceutical/cosmetic composition thereof, introduced into the subject (and/or an ancestor of the subject).

[1135] A method of Claim 36, wherein a minority of the subject's cells have an increased amount of (at least one type of) IF1 protein (and/or sequence variant(s) thereof).

[1136] A method of Claim 36, wherein a majority, optionally all, of the subject's cells have an increased amount of (at least one type of) IF1 protein (and/or sequence variant(s) thereof).

[1137] A method of Claim 36, wherein the subject has an increased amount of (at least one type of) IF1 protein (and/or sequence variant(s) thereof) in one or more of their body parts/organs/tissues/cell populations/brain regions (and/or one or more sub-parts/regions thereof).

[1138] A method of Claim 36, wherein the subject has an increased amount of (at least one type of) IF1 protein (and/or sequence variant(s) thereof) in two or more of their body parts/organs/tissues/cell populations/brain regions (and/or one or more sub-parts/regions thereof).

[1139] A method of Claim 36, wherein the subject has an increased amount of (at least one type of) IF1 protein (and/or sequence variant(s) thereof) in one or more cells of one or more body parts/organs/tissues/cell populations/brain regions (and/or one or more sub-parts/regions thereof) that tend to age fastest and/or where slower aging is most desired by (or most recommended to, optionally by a healthcare worker) the subject and/or the aging of which is particularly/possibly associated with/can drive an age-correlated (risk/incidence increases with age) disorder(s)/disease(s) and/or the failing of which can be a cause of death and/or the failing of which can be a common cause of death and/or the failing of which can be an unwanted cause of death.

[1140] A method of treating/ameliorating/preventing/combating/reversing/slowing/delaying aging in a subject (and/or, in the subject, increasing their lifespan and/or healthspan and/or treating/ameliorating/preventing/combating/reversing/slowing/delaying an unwanted/undesirable aspect(s)/sign(s) of aging and/or one or more of an age-correlated disorder(s)/disease(s)/damage(s)/sign(s)/decline in function(s)/decline in aesthetic(s)) wherein the method comprises administering to the subject (and/or the subject self-administering), systemically and/or locally/topically to the subject's body part(s)/organ(s)/tissue(s)/cell population(s)/cell(s) where the effect(s) is (most) sought (e.g. to one or more areas of skin/scalp e.g. one or more areas of the face, e.g. to one or both eyes/ears, e.g. to one or more joints), optionally as part of a pharmaceutical/cosmetic/supplement composition/medicament, an amount (preferably an effective amount e.g. a therapeutically/cosmetically effective amount) of at least one compound/composition that has the ability/property (for non-limiting example in a Sub-Mitochondrial Particle [SMP] assay of F₁F₀ ATP hydrolysis) to preferentially/disproportionally inhibit/reduce the activity of the ATP-hydrolysing, as compared to the ATP-synthesizing, mode of ATP synthase;
[1141] preferably wherein there is a notable/sizeable differential between the compound's EC₅₀ F₁F₀ ATP synthesis and a smaller valued EC₅₀ F₁F₀ ATP hydrolysis (for non-limiting example in a Sub-Mitochondrial Particle [SMP] assay of F₁F₀ ATP hydrolysis), wherein greater disparity is more preferred, for example (in order of increasing preference) one or more of >10, >100, >1000, >5000 times difference, optimally wherein the compound inhibits/reduces the activity of the ATP-hydrolysing mode of ATP synthase and does not, or does not appear to, or only minimally, or much less, inhibits/reduces the activity of the ATP-synthesizing mode of ATP synthase.

[1142] A method of treating/ameliorating/preventing/combating/reversing/slowing/delaying aging in a subject (and/or, in the subject, increasing their lifespan and/or healthspan and/or treating/ameliorating/preventing/combating/reversing/slowing/delaying an unwanted/undesirable aspect(s)/sign(s) of aging and/or one or more of an age-correlated disorder(s)/disease(s)/damage(s)/sign(s)/decline in function(s)/decline in aesthetic(s)) wherein the method comprises administering to the subject (and/or the subject self-administering), systemically and/or locally/topically to the subject's body part(s)/organ(s)/tissue(s)/cell population(s)/cell(s) where the effect(s) is (most) sought (e.g. to one or more areas of skin/scalp e.g. one or more areas of the face, e.g. to one or both eyes/ears, e.g. to one or more joints), optionally as part of a pharmaceutical/cosmetic/supplement composition/medicament, an amount (preferably an effective amount e.g. a therapeutically/cosmetically effective amount) of at least one proteinaceous compound/peptide/protein/polypeptide/amino-acid sequence based compound, wherein this compound(s)/composition(s) has the ability/property (for non-limiting example in a Sub-Mitochondrial Particle [SMP] assay of F₁F₀ ATP hydrolysis) to preferentially/disproportionally inhibit/reduce the activity of the ATP-hydrolysing, as compared to the ATP-synthesizing, mode of ATP synthase; preferably wherein there is a notable/sizeable differential between the compound's EC₅₀ F₁F₀ ATP synthesis and a smaller valued EC₅₀ F₁F₀ ATP hydrolysis (for non-limiting example in a Sub-Mitochondrial Particle [SMP] assay of F₁F₀ ATP hydrolysis), wherein greater disparity is more preferred, for example (in order of increasing preference) one or more of >10, >100, >1000, >5000 times difference, optimally wherein the compound inhibits/reduces the activity of the ATP-hydrolysing mode of ATP synthase and does not, or does not appear to, or only minimally, or much less, inhibits/reduces the activity of the ATP-synthesizing mode of ATP synthase;
[1143] and/or the (self-) administration to the subject of at least one polynucleotide sequence that codes for an aforementioned protein(s)/peptide(s) of this present claim, which inhibits/reduces F₁F₀ ATP hydrolysis, preferably with characteristics as aforementioned, and/or at least one vector(s)/plasmid(s)/liposome(s)/nanoparticle(s) thereof, and/or at least one cell(s) thereof, and/or at least one gene therapy thereof, and/or at least one transgenic organism/virus thereof, and/or at least one pharmaceutical/cosmetic composition thereof.

[1144] A method of treating/ameliorating/preventing/combating/reversing/slowing/delaying aging in a subject (and/or, in the subject, increasing their lifespan and/or healthspan and/or treating/ameliorating/preventing/combating/reversing/slowing/delaying an unwanted/undesirable aspect(s)/sign(s) of aging and/or one or more of an age-correlated disorder(s)/disease(s)/damage(s)/sign(s)/decline in function(s)/decline in aesthetic(s)) wherein the method comprises administering to the subject (and/or the subject self-administering), systemically and/or locally/topically to the subject's body part(s)/organ(s)/tissue(s)/cell population(s)/cell(s) where the effect(s) is (most) sought (e.g. to one or more areas of skin/scalp e.g. one or more areas of the face, e.g. to one or both eyes/ears, e.g. to one or more joints), optionally as part of a pharmaceutical/cosmetic/supplement composition/medicament, an amount (preferably an effective amount e.g. a therapeutically/cosmetically effective amount) of (optionally produced/isolated/purified/substantially purified/partially purified) at least one [any] IF1 protein/fragment (or sequence variant thereof) and/or (optionally produced/isolated/purified/substantially purified/partially purified) at least one fusion protein comprising at least one [any] IF1 protein/fragment (or sequence variant thereof), and/or at least one pharmaceutically/cosmetically acceptable salt, solvate, hydrate, prodrug, liposome, nanoparticle (e.g. lipid nanoparticle, LNP) or other vector of the art thereof, optionally comprising an N-terminal Cell Penetrating Peptide (CPP) sequence(s) concatenated to a Mitochondrial Import Sequence(s) (MIS(s)) concatenated to a (preferably “mature” i.e. without its MIS) IF1 protein/fragment (or sequence variant thereof), and/or (optionally produced/isolated/purified/substantially purified/partially purified) at least one polynucleotide coding for at least one [any] IF1 protein/fragment (or sequence variant thereof), and/or a fusion protein(s) thereof, and/or a vector(s)/plasmid(s)/liposome(s)/nanoparticle(s)/gene therap[y/ies]/cell(s) thereof, and/or at least one pharmaceutical/cosmetic composition thereof.

[1145] A method of Claim 50 wherein one or more of the following applies/is true (wherein all possible combinations are contemplated {including all possible combinations of elements/descriptors within, and across, different bullet points} except those that are mutually exclusive):
[1146] (i) at least one IF1 protein/fragment (or sequence variant thereof), and/or at least one IF1 protein/fragment (or sequence variant thereof) containing fusion protein, is according to one or more of Claims 11-17, 25-29;
[1147] (ii) at least one polynucleotide is according to Claim 18;
[1148] (iii) at least one vector/plasmid is according to Claim 19;
[1149] (iv) at least one cell is according to Claim 20;
[1150] (v) at least one gene therapy is according to one or more of Claims 22, 30;
[1151] (vi) at least one medicament or pharmaceutical/cosmetic composition is according to one or more of Claims 24, 31;
[1152] (vii) at least one IF1 protein/fragment (or sequence variant thereof), and/or IF1 protein/fragment (or sequence variant thereof) component to a fusion protein, is part, or the entirety, of the subject's species' native IF1 protein, or a sequence variant thereof;
[1153] (viii) at least one IF1 protein/fragment (or sequence variant thereof), and/or IF1 protein/fragment (or sequence variant thereof) component to a fusion protein, is from a species that tends to live longer (e.g. has a greater maximal lifespan) than the subject's species, optionally/preferably from one of the most long-lived species on Earth e.g. bowhead whale;
[1154] (ix) at least one IF1 protein/fragment (or sequence variant thereof), and/or IF1 protein/fragment (or sequence variant thereof) component to a fusion protein, is a fusion of fragment(s)/residue(s) of IF1 protein sequences from two or more different species, optionally with one or more (preferably single residue) substitutions/insertions/deletions atop at one or more positions, preferably at less than 10 positions;
[1155] (x) at least one IF1 protein/fragment (or sequence variant thereof), and/or IF1 protein/fragment (or sequence variant thereof) component to a fusion protein, has a Mitochondrial Import Sequence [MIS] attached (preferably by peptide bond to its N-terminal end) that is the same as an MIS that the subject's/subject's species' uses to transport one or more of its endogenous/native proteins from the cytoplasm to the mitochondrial matrix, optionally the MIS that the subject's/subject's species' uses for its endogenous/native IF1 protein;
[1156] (xi) at least one IF1 protein fragment (or sequence variant thereof) is administered;
[1157] (xii) at least one IF1 protein (or sequence variant thereof) and at least one IF1 protein fragment (or sequence variant thereof) is administered;
[1158] (xiii) multiple different IF1 protein and/or IF1 protein fragment sequences, optionally wherein one or more are sequence variants, optionally wherein two or more different (optionally overlapping) fragments from the same IF1 protein (from the same species) or from the same sequence variant thereof, are administered;
[1159] (xiv) at least one IF1 protein/fragment (or sequence variant thereof) is functional as a stand-alone/separate peptide/protein i.e. it can inhibit/reduce F₁F₀ ATP hydrolysis (e.g. inside a cell, preferably a eukaryote cell, and/or in a Sub-Mitochondrial Particle (SMP) assay of the art, which assays F₁F₀ ATP hydrolysis [functional in an SMP assay with native IF1 protein removed and/or present]), optionally/preferably wherein it confers greater inhibition of F₁F₀ ATP hydrolysis than a naturally occurring IF1 protein at pH 8;
[1160] (xv) at least one IF1 protein/fragment (or sequence variant thereof) has one or more conservative substitutions, and/or one or more non-conservative substitutions, and is functional i.e. it can inhibit/reduce F₁F₀ ATP hydrolysis (e.g. inside a cell, preferably a eukaryote cell, and/or in a Sub-Mitochondrial Particle (SMP) assay of the art, which assays F₁F₀ ATP hydrolysis [functional in an SMP assay with native IF1 protein removed and/or present]), optionally/preferably wherein it has greater inhibitory activity against F₁F₀ ATP hydrolysis than a naturally occurring IF1 protein at pH 8;
[1161] (xvi) at least one IF1 protein/fragment (or sequence variant thereof) has notable/high sequence identity (e.g. one or more of ≥28%, ≥30%, >40%, ≥50%, ≥60%, ≥70%, ≥75%, ≥80%, ≥85%, >90%, ≥95%, ≥96%, >97%, ≥98%, ≥99% sequence identity and/or less than 12, or less than 10, or less than 8, or less than 6, or less than 5, or less than 4, or less than 3, or 1 to 2 single residue substitutions/insertions/deletions away from a native IF1 protein sequence or fragment(s) thereof) to the entirety, or part, of at least one IF1 protein from a species, and is functional i.e. it can inhibit/reduce F₁F₀ ATP hydrolysis (e.g. inside a cell, preferably a eukaryote cell, and/or in a Sub-Mitochondrial Particle (SMP) assay of the art, which assays F₁F₀ ATP hydrolysis [functional in an SMP assay with native IF1 protein removed and/or present]), optionally/preferably wherein it has greater inhibitory activity against F₁F₀ ATP hydrolysis than a naturally occurring IF1 protein at pH 8.

### Accounting for Body Temperature Effect

[1162] A method of one or more of Claims 33-51 wherein administration is local/topical, instead of systemic, and so any ensuing reduction in endogenic/metabolic heat production in (and optionally around) the administered area (caused by less F₁F₀ ATP hydrolysis in that area) is compensated for by heat transfer from other body regions, especially via blood flow, maintaining (at or close to) the optimal body temperature (e.g. ˜37° C. in a mammal) in/around the administered area;
[1163] optionally wherein administration is local/topical to the skin/scalp, optionally in a pharmaceutical/cosmetic/supplement composition of the art for topical/skin/scalp/transdermal (e.g. human skin/scalp) administration, optionally a cream/lotion/spray/gel/oil/liquid/foam/paste/aerosol/butter/patch/make-up/shampoo/soap thereof, optionally wherein this administration acts to slow/delay/reverse/treat/ameliorate/prevent/combat skin/scalp aging (e.g. one or more signs of skin aging/photaging/age-correlated damage: non-limiting e.g. lateral canthal lines (crow's feet), liver/age spot(s), wrinkle(s) [e.g. facial wrinkles], fine lines in the skin (e.g. around eyes and/or mouth), expression lines, dark circles/“bags” under the eyes, hair greying/loss etc.);
[1164] optionally wherein administration is local/topical to one or both eyes, optionally in a pharmaceutical composition of the art for eye administration, optionally one or more of eye drop(s), intravitreal injection(s), contact lens coating/solution (optionally wherein the contact lens has little to no refractive ability or wherein the contact lens is prescriptive to the refractive defect/error of the subject's eye(s)) thereof, optionally wherein this administration acts to slow/delay/reverse/treat/ameliorate/prevent/combat eye(s) aging and/or at least one eye(s) aging related disease/disorder, including any eye disease(s)/disorder(s) whose likelihood of onset increases with age and/or worsens with age, including (to illustrate and not restrict) age-related macular degeneration (AMD, early/intermediate/late), age-related wet macular degeneration, neovascular/wet AMD, dry AMD, Geographic atrophy (GA), wet and dry AMD in the same eye(s), Stargardt's macular degeneration, Best vitelliform macular dystrophy, diabetic retinopathy, proliferative diabetic retinopathy, diabetic macular edema, vision loss, progressive vision impairment, myopia (short-sightedness), degenerative myopia, hyperopia (far-sightedness), accommodative dysfunction, glaucoma, progressive glaucoma, cataract formation, retinal degeneration, progressive retinal degeneration, retinitis pigmentosa, leber hereditary optic neuropathy, Fuchs spot, Best's disease, Sorsby's fundus dystrophy.

[1165] A method of one or more of Claims 33-51 wherein administration is systemic, and optionally the subject is monitored, for example by a healthcare professional(s) and/or machine substitute(s), for sign(s) of reduction in body temperature and/or the subject is located at an ambient temperature that maintains their body temperature within safe limits whilst they have an effective amount of administered compound(s)/composition(s) in their system and/or the subject wears (and/or is covered by) insulating material(s), e.g. clothing/clothes (and/or bedding/blanket(s)), and/or is in a heated/insulated space and/or hot climate, optionally exceeding 25° C. or 28° C. or 30° C. or 35° C. or 36° C. or 37° C., optionally at or around 37° C., wherein a high (e.g. in the thirties ° C. i.e. 3×° C. where x is a number between 0 and 9), but safe, ambient temperature (and/or greater bodily insulation, for example by clothing/clothes and/or bedding/blanket(s)) can permit a greater compound(s)/composition(s) dose(s) to be safely administered, wherein a preferred ambient temperature is the thermoneutral temperature for the subject with the amount of bodily insulation they have, e.g. the amount of clothing they are wearing, if any, and the amount of the administered compound(s)/composition(s) in their body/system;
[1166] optionally wherein the subject wears one or more items of clothing, and/or is sheltered, and/or is in a heated and/or insulated confinement/room/space, some or all of the time whilst they have an amount (e.g. effective amount e.g. a therapeutically/cosmetically effective amount) of the administered compound(s)/composition(s) in their body/system;
[1167] optionally wherein the subject is administered (and/or self-administers) the compound(s)/composition(s) shortly before they sleep, preferably wherein they are sheltered (e.g. inside instead of outside) and/or insulated (e.g. by bedding(s)/blanket(s), and/or clothing, and the like) whilst they sleep, optionally in a heated room/building/confinement that is set to a higher (safe) temperature than outside it.

### Structure to Function

[1168] An IF1 protein/fragment (or sequence variant thereof), or fusion protein thereof, optionally a pharmaceutically/cosmetically acceptable salt, solvate, hydrate, prodrug, liposome, nanoparticle (e.g. lipid nanoparticle, LNP) or other vector of the art thereof, wherein one or more of the following applies to it (wherein all possible combinations are contemplated {including all possible combinations of elements/descriptors within, and across, different bullet points} except those that are mutually exclusive), wherein some functional significance is disclosed in this present claim:
[1169] (i) contains one or more corresponding (to its sequence) D-amino acids;
[1170] (ii) contains one or more retroinverse regions, or all of it is retroinverse, optionally wherein the Cell Penetrating Peptide (CPP) component (if present) is retroinverse (in part or entirety) and/or the IF1 protein/fragment (or sequence variant thereof) is retroinverse (in part or entirety);
[1171] (iii) N^{α}-alkylated (e.g. N^{α}-methylated) at one or more places;
[1172] (iv) part(s) or all is cyclized, in one or more cycles;
[1173] (v) part(s) or all is bicyclic via attachment to a scaffold(s), optionally rendered bicyclic by judicious insertion of cysteine residues which confer attachment to a scaffold structure by thioether and/or disulphide bonds;
[1174] (vi) modified at its N- and/or C-terminal ends, optionally amidation/esterification of the C-terminus and/or acylation (e.g. acetylation) of the N-terminus;
   wherein one or more of the aforementioned features reduces susceptibility to protease(s) in the blood and increases peptide/protein half-life in the blood circulation of a subject (increases its plasma stability);
[1175] (vii) at least one of its carboxylic groups is esterified, optionally such that one or more of its carboxyl (COOH) groups is replaced by the group (or analogue thereof):

[chemical structure]

[1176] wherein R_{A} is (independently at each point of use) an alkyl or alkoxy (optionally at the para position on the indicated phenyl ring) or halogen, n is between 0 and 3, R is an alkyl, alkenyl, alkynyl group or hydrogen, R_{M} is an alkyl, alkenyl, alkynyl, cycloalkyl, aryl, or arylalkyl group which is optionally substituted with one or more alkyl, alkoxy, aryl, alkylaryl, halogen, haloalkyl, or haloalkoxy group, for example:

[chemical structure]

[1177] wherein this esterification confers (or enhances) the ability to passage a biological/plasma membrane(s), wherein the moiety/moieties attached by an ester bond are cleaved off by esterases once the peptide/protein enters a cell;
[1178] this esterification also (sterically) reduces susceptibility to proteases in the blood and so increase plasma half-life;
[1179] (viii) at least one IF1 protein/fragment (or sequence variant thereof), and/or IF1 protein/fragment (or sequence variant thereof) containing fusion protein, has a fatty acid (optionally linear or branched, saturated or unsaturated, containing 2 to 100 carbon atoms, more preferably from 2 to 25 carbon atoms; or derivative thereof) acylated to its N-terminus, non-limiting e.g. myristoyl/palmitoyl/stearoyl group conjugated to N-terminus;
[1180] (ix) a sequence, containing a number (integer selected from between 1 and 8) of amino acid residues (optionally wherein one or more are hydrophobic {optionally at least as hydrophobic as phenylalanine}, and/or one or more are positively charged {e.g. are lysine and/or arginine}, and/or one or more are reasonably hydrophobic with an ability to adopt a positive charge {e.g. histidine}), is peptide-bonded to the N-terminus, optionally wherein a fatty acid (or a derivative thereof) is conjugated/acylated to the resultant N-terminus of this fusion protein, and/or conjugated/acylated to the side-chain of one or more of these additional amino acid residues, optionally wherein at least one of these additional residues is a lysine, and a fatty acid is conjugated/acylated to its side-chain (optionally via a “spacer” moiety, which can be for non-limiting example, an amino acid(s) [e.g. L-γ-glutamic acid] or a dipeptide(s), or L-γ-glutamic acid and two OEG {8-amino-3,6-dioxaoctanoic acid} units), optionally wherein at least one of these added residues is cysteine, and a cholesterol derivative (e.g. cholesterol modified with a cysteine-reactive 2-bromoacetyl moiety) or fatty acid derivative (e.g. [hydrogen atoms not shown]: S—C—C(COOH)—N—C(O)—(C)ₙ wherein n is between 2 and 100, preferably between 2 and 25) is conjugated to its side-chain by a disulphide bond, preferably wherein this added sequence only has one lipophilic (fatty acid/cholesterol or derivative thereof) moiety attached in total, wherein a preferred fatty acid is linear or branched, saturated or unsaturated, containing between 2 to 100 carbon atoms, more preferably between 2 to 25 carbon atoms, optionally wherein an attached fatty acid is a myristoyl/palmitoyl/stearoyl group;
[1181] (x) at least one cysteine residue in the amino acid sequence, optionally inserted/substituted into the sequence, optionally a cysteine present or substituted into the correspondent position to the (using “mature” [without MIS] IF1 protein numbering) 37^{th} amino acid position of the IF1 protein/fragment (or sequence variant thereof) [incidentally, gray whale IF1 protein has a cysteine residue in this position], which has a cholesterol derivative (e.g. cholesterol modified with a cysteine-reactive 2-bromoacetyl moiety) or a fatty acid (or derivative thereof) conjugated to it, preferably via a disulphide bond, optionally wherein the fatty acid derivative is [hydrogen atoms not shown]: S—C—C(COOH)—N—C(O)—(C)ₙ wherein n is between 2 and 100, preferably between 2 and 25, wherein (C)ₙ can be linear or branched, saturated or unsaturated;
[1182] conjugated fatty acid (or derivative thereof) confers self-association and/or binding to albumin in the blood, which (sterically) decreases protease(s) access to peptide/protein, and/or slows its renal clearance, thence increasing its half-life in blood (e.g. from minutes to hours);
[1183] conjugated cholesterol/fatty acid (or derivative thereof) increases lipophibicity and confers (or enhances) the ability to passage a biological/plasma membrane(s);
[1184] when cholesterol/fatty acid (or derivative thereof) is attached by a disulphide bond, this attachment breaks once inside the reducing intracellular environment;
[1185] the pre-sequence/residue increases peptide/protein lipophibicity, which confers (or enhances) its ability to passage a biological/plasma membrane(s), and/or contributes positive charge which enhances the ability to passage into a live cell (negative inside);
[1186] in preferred cases, wherein this pre-sequence/residue/attachment is more N-terminal in the fusion protein than a Mitochondrial Import Sequence (MIS), it is inherently cleaved from the IF1 protein/fragment (or sequence variant thereof) when the MIS is cleaved off, in the mitochondrial matrix;
[1187] (xi) Cell Penetrating Peptide (CPP) component(s) to fusion protein, which comprises (or consists of) R7 [SEQ ID NO:455] or RRRRRRRG [SEQ ID NO:461] or RRRRRRRP [residues 4-11 of SEQ ID NO:453];
[1188] confers better cellular penetration than a Tat sequence; correspondent to amino acid sequences found within the human and mouse proteome and so less immunogenic in those species (amongst others) than a Tat sequence (for example); optional terminal glycine (G) or proline (P) confers flexibility at its C-terminal connection point to fusion protein;
[1189] (xii) Mitochondrial Import Sequence (MIS) and IF1 protein/fragment (or sequence variant thereof) components to fusion protein are from different species;
[1190] this permits the MIS to be from a species that will be administered the fusion protein, facilitating its better delivery into the mitochondrial matrix in that species, and the IF1 protein/fragment (or sequence variant thereof) to be from a different, longer living species (a species with a greater maximal lifespan);
[1191] (xiii) IF1 protein/fragment (or sequence variant thereof) component/entirety comprises (or consists of) that from a long-lived species, preferably at least as long-living as Bos taurus, more preferably from one of the longest-lived species/mammals on Earth e.g. bowhead or blue whale;
[1192] (xiv) one or more (or two/three/four/five/six/seven/eight/nine/ten/eleven/twelve/thirteen/fourteen/fifteen/sixteen/seventeen or more) of the following is true of the IF1 protein/fragment (or sequence variant thereof) component/entirety: (using “mature” [without Mitochondrial Import Sequence (MIS)] IF1 protein numbering): 49^{th} residue is not histidine, 14^{th} residue is not a residue that can be phosphorylated (i.e. is not serine or threonine), 26^{th} residue is not glutamic acid, 48^{th} residue is not histidine, 55^{th} residue is not histidine, 56^{th} residue is not histidine, 49^{th} residue is lysine or alanine or arginine, 14^{th} residue is alanine, 26^{th} residue is alanine or glutamine, 48^{th} residue is alanine, 55^{th} residue is alanine, 56^{th} residue is alanine, 79^{th} residue is glycine or asparagine, 76^{th} residue is lysine, 73^{rd} residue is serine, 62^{nd} residue is histidine, 82^{nd} residue is aspartic acid, 83^{rd} residue is aspartic acid, 84^{th} residue is aspartic acid, 85^{th} residue is aspartic acid, 57^{th} residue is valine, 54^{th} residue is serine or aspartic acid, 61^{st} residue is glutamine, 51^{st} residue is asparagine, 47^{th} residue is glutamic acid, 46^{th} residue is arginine, 44^{th} residue is serine, 39^{th} residue is lysine, 38^{th} residue is alanine or glutamic acid, 37^{th} residue is arginine or cysteine or lysine, 36^{th} residue is aspartic acid or glutamic acid, 29^{th} residue is histidine, 27^{th} residue is alanine, 25^{th} residue is lysine, 17^{th} residue is aspartic acid, 12^{th} residue is glycine, 11^{th} residue is serine or threonine, 10^{th} residue is serine or glycine, 9^{th} residue is glycine, 8^{th} residue is leucine or glycine, 6^{th} residue is aspartic acid or glycine, 5^{th} residue is alanine, 4^{th} residue is serine or glycine, 3^{rd} residue is glutamic acid or serine or lysine, 2^{nd} residue is glycine, 1^{st} residue is leucine;
[1193] (xv) IF1 protein/fragment (or sequence variant thereof) component/entirety is truncated, without C-terminal regions required for dimerization, teteramerization and higher oligomerization, for example it is only IF1 protein residues {using “mature” [without MIS] IF1 protein numbering}: 14-47 (or 10-47 or 13-47 or 1-56 or 1-58 or 1-60 or 10-56 or 10-58 or 10-60), preferably wherein if its 14^{th} residue isn't alanine, it is substituted to be alanine;
[1194] (xvi) IF1 protein/fragment (or sequence variant thereof) component/entirety is truncated, without the ability to inhibit F₁F₀ ATP hydrolysis itself, but wherein it binds at least one part in the C-terminal half of a complete IF1 protein, wherein (because it is truncated appropriately) its binding doesn't occlude the more N-terminal IF1 protein component that inhibits F₁F₀ ATP hydrolysis, but it does occlude one or more of the IF1 protein parts involved in tetramer (and higher) oligomerization (sequesteration) at alkaline pH (e.g. pH 8, normal pH of mitochondrial matrix), liberating IF1 dimers/monomers that can inhibit F₁F₀ ATP hydrolysis at pH 8; advantageously such an IF1 protein/fragment (or sequence variant thereof) tends to be shorter (better for intracellular delivery) than a IF1 protein/fragment (or sequence variant thereof) that can inhibit F₁F₀ ATP hydrolysis itself (e.g. aforementioned IF1 protein residues: 14-47); this particular approach relies on the endogenous IF1 protein and so works best in longer-living species which tend to have more, and/or more potent, IF1 protein; with this approach it is preferred for the IF1 protein/fragment (or sequence variant thereof) to be from the species to be administered or a shorter-living species (IF1 protein from a longer-living species binds ATP synthase more tightly/potently, and other IF1 proteins {to form IF1 protein tetramers and higher oligomers} less tightly; IF1 protein from a shorter-living species binds ATP synthase less tightly/potently and other IF1 proteins {to form IF1 protein tetramers and higher oligomers} more tightly; so shorter-living species have more tightly bound IF1 tetramers {and higher oligomers} and so a IF1 protein/fragment {or sequence variant thereof} solely designed to bind another IF1 protein is better sourced from a shorter than a longer-living species, but preferably from a species not too far evolutionarily removed from a/each species to be administered); preferably this IF1 protein/fragment (or sequence variant thereof) is less than 25 amino acids long, more preferably less than 20;
[1195] wherein one or more of the aforementioned features confers increased ability to inhibit/reduce F₁F₀ ATP hydrolysis at alkaline pH e.g. at pH 8 [which is the normal pH of the mitochondrial matrix] e.g. in a Sub-Mitochondrial Particle (SMP) assay of F₁F₀ ATP hydrolysis and/or in a cell and/or in a subject;
[1196] wherein one or more of the aforementioned features, when the peptide/protein is administered to a subject, confers increased ability to slow aging (conferring increased associated benefit(s), e.g. increased cosmetic(s) and/or therapeutic effect(s), thereof) in the subject.

### Transgenic Organisms Containing at Least One Transgenic IF1 Protein/Fragment (or Sequence Variant Thereof) Coding Nucleotide Sequence

[1197] An organism, preferably/restrictively a non-human organism, optionally a mouse, which has an H49K (or H49A or H49R), and/or S14A (or T14A), substitution in the IF1 protein produced by its mutated/modified ATPIF1 (ATP5IF1) gene,
[1198] or/and
[1199] a transgenic organism, preferably/restrictively a non-human transgenic organism, optionally a transgenic microorganism, preferably a non-human transgenic mammal, optionally a transgenic mouse, containing/expressing/constitutively expressing at least one transgenic ATPIF1 gene(s) (and/or sequence variant thereof; and/or IF1 protein/fragment [and/or sequence variant thereof] coding polynucleotide sequence[s] without (or with less) introns), optionally at least one (wherein all possible combinations are contemplated {including all possible combinations of elements/descriptors within, and across, different bullet points} except those that are mutually exclusive):
   [1200] (i) polynucleotide sequence coding for/expressing at least one IF1 protein from a longer living species (longer maximal lifespan), preferably which (using “mature” [without MIS] IF1 protein numbering) has a H49K (or H49A or H49R) substitution and, if its 14^{th} residue is not already alanine, it is substituted to be alanine; or
   [1201] (ii) polynucleotide sequence coding for/expressing an IF1 protein from blue whale (Balaenoptera musculus), preferably which (using “mature” [without MIS] IF1 protein numbering) has H49K (or H49A or H49R) and/or T14A substitutions; or
   [1202] (iii) polynucleotide sequence coding for/expressing an IF1 protein from bowhead whale (Balaena mysticetus), preferably which (using “mature” [without MIS] IF1 protein numbering) has an H49K (or H49A or H49R) substitution; or
   [1203] (iv) polynucleotide sequence coding for/expressing an IF1 protein from human, which (using “mature” [without MIS] IF1 protein numbering) has H49K (or H49A or H49R) and S14A substitutions; or
   [1204] (v) polynucleotide sequence coding for/expressing at least one IF1 protein fragment (or sequence variant thereof) concatenated at its N-terminal end to a Mitochondrial Import Sequence (MIS, for transport into the mitochondrial matrix), preferably an MIS that the organism species uses for one of one or more proteins it transports from the cytoplasm to the mitochondrial matrix, more preferably the MIS that it uses for its endogenous/native IF1 protein, wherein the IF1 protein fragment (or sequence variant thereof) can optionally be:
      [1205] (a) IF1 protein fragment (or sequence variant thereof) less than z amino acids long, wherein z is an integer selected from a group comprising 85, 84, 83, 82, 81, 80, 79, 78, 77, 76, 75, 74, 73, 72, 71, 70, 69, 68, 67, 66, 65, 64, 63, 62, 61, 60, 59, 58, 57, 56, 55, 54, 53, 52, 51, 50, 49, 48, 47, 46, 45, 44, 43, 42, 41, 40, 39, 38, 37, 36, 35, 34, 33, 32, 31, 30, 29, 28, 27, 26, 25, 24, 23, 22, 21, 20, 19, 18, 17, 16, 15, 14, 13, 12, 11, 10, 9, 8, 7, 6, 5, 4, 3, 2 [different values of z are different embodiments]; or
      [1206] (b) IF1 protein fragment (or sequence variant thereof) of (using “mature” {without MIS} IF1 protein numbering) x-y, where x is an integer between 1 and 20 (or between 1 and 44, or between 1 and 84), and y is an integer between 40 and 85 (or between 40 and 85, or between 2 and 85) [different values of x and/or y are different embodiments; within their aforementioned range constraints, all possible combinations of x and y integer values are contemplated]; or
      [1207] (c) IF1 protein fragment (or sequence variant thereof) selected from a group comprising (using “mature” [without MIS] IF1 protein numbering): 1-84, 2-84, 3-84, 4-84, 5-84, 6-84, 7-84, 8-84, 9-84, 10-84, 11-84, 12-84, 13-84, 14-84, 15-84, 16-84, 17-84, 18-84, 19-84, 20-84, 21-84, 22-84, 23-84, 24-84, 25-84, 26-84, 27-84, 28-84, 29-84, 30-84, 31-84, 32-84, 33-84, 34-84, 35-84, 36-84, 37-84, 38-84, 39-84, 40-84, 41-84, 42-84, 43-84, 44-84, 45-84, 46-84, 47-84, 48-84, 49-84, 50-84, 51-84, 52-84, 53-84, 54-84, 55-84, 56-84, 57-84, 58-84, 59-84, 60-84, 61-84, 62-84, 63-84, 64-84, 65-84, 66-84, 67-84, 68-84, 69-84, 70-84, 71-84, 72-84, 73-84, 74-84, 75-84, 76-84, 77-84, 78-84, 79-84, 80-84, 81-84, 82-84, 83-84, OR a sub-sequence/fragment of one of these aforementioned fragments; or
      [1208] (d) IF1 protein fragment (or sequence variant thereof) optionally selected from (using “mature” {without MIS} IF1 protein numbering): residues: 14-47, 13-47, 12-47, 11-47, 10-47, 9-47, 8-47, 7-47, 6-47, 5-47, 4-47, 3-47, 2-47, 1-47, 14-48, 14-46, 14-45, 14-44, 14-43, 14-42, 13-48, 13-46, 13-45, 13-44, 13-43, 13-42, 12-48, 12-46, 12-45, 12-44, 12-43, 12-42, 11-48, 11-46, 11-45, 11-44, 11-43, 11-42, 10-48, 10-46, 10-45, 10-44, 10-43, 10-42, 42-58, 42-59, 1-56, 1-57, 1-58, 1-59, 1-60, 10-56, 10-57, 10-58, 10-59, 10-60, 14-60, 10-84, 14-84, 18-84, 10-50, 1-45, 42-56, 42-47, 48-56, 49-55 (or sequence variant thereof of any fragment aforementioned); or
      [1209] (e) IF1 protein fragment (using “mature” {without MIS} IF1 protein numbering): residues: 10-47 or 13-47 or 42-58 or 42-59 or 42-56 or 1-56 or 1-58 or 1-60 or 10-56 or 10-58 or 10-60 (or sequence variant thereof); or
      [1210] (f) bowhead whale IF1 protein fragment (using “mature” {without MIS} IF1 protein numbering): residues: 10-47 or 13-47 or 42-58 or 42-59 or 42-56 or 1-56 or 1-58 or 1-60 or 10-56 or 10-58 or 10-60; or
      [1211] (g) blue whale IF1 protein fragment (using “mature” {without MIS} IF1 protein numbering): residues: 10-47 or 13-47 or 42-58 or 42-59 or 42-56 or 1-56 or 1-58 or 1-60 or 10-56 or 10-58 or 10-60, preferably with a T14A substitution; or
      [1212] (h) human IF1 protein fragment (using “mature” {without MIS} IF1 protein numbering): residues: 10-47 or 13-47 or 42-58 or 42-59 or 42-56 or 1-56 or 1-58 or 1-60 or 10-56 or 10-58 or 10-60, preferably with a S14A substitution;
[1213] in one or more of:
   [1214] (i) one or both its eyes;
   [1215] (ii) forebrain/intestine/liver and at least one other brain region/body region/organ/tissue/cell population;
   [1216] (iii) forebrain/intestine/liver and at least two other brain/body regions/organs/tissues/cell populations;
   [1217] (iv) two or more of forebrain, midbrain and hindbrain;
   [1218] (v) cell type(s)/cell population(s)/tissue(s)/organ region(s)/organ(s) that tends to age faster, and underperform/fail/lose optimal function earlier (optionally wherein this underperformance/failure/optimal function loss can cause a pathology/disease in a subject [e.g. of aging] and/or sign(s) of aging/older age/old age e.g. a neurodegenerative disease), than most cell type(s)/cell population(s)/tissue(s)/organ region(s)/organ(s) in the body;
   [1219] (vi) in one or more dopamine neurons, preferably the majority/all, in the pars compacta (in the substantia nigra);
   [1220] (vii) in more than one different cell population/tissue/organ region/organ/brain region (and/or one or more sub-parts/regions thereof), optionally in at least 15% or 25% or 50% or 75% or 90% or many/majority of the organism's cells/cell populations/tissues/organs, optionally in all;
[1221] preferably wherein this modified organism has a longer healthspan and/or lifespan than is typical for its species, optionally wherein, if the modified organism is a mouse, it has a lifespan in excess of 6 and/or 5 years, optionally wherein this organism is entered into one or more lifespan and/or healthspan assays (and/or competitions e.g. M Prize or similar) of the art, optionally wherein this longer healthspan and/or lifespan is only observed when the method of Claim 56 is performed with a transgenic organism of the present claim.

[1222] A method, which is especially applicable when the organism is of a homeothermic species, of using/keeping alive an organism of Claim 55 wherein the organism lives (is reared/housed/kept) at a higher/sufficiently high safe ambient temperature (e.g. at, or at a safe temperature in excess of, 25/30/37° C.), and/or is afforded more bodily insulation, to account for it having less endogenous/metabolic heat production and a higher thermoneutral/thermo-comfortable temperature.

### Maladies of Aging

[1223] A method of any of Claims 33-53 and/or a pharmaceutical/dermopharmaceutical/cosmetic/supplement composition/medicament/peptide/protein/vector/gene therapy of any of Claims 24, 31, 54, wherein the unwanted/undesirable aspect(s)/sign(s) of aging and/or disorder(s)/disease(s) of aging (e.g. risk/incidence increases with increased age/senescence) includes (to illustrate and not restrict) geriatric aging, age-associated decline, age-related/correlated disease/disorder/condition, aging frailty, frailty, frailty syndrome, wasting, sarcopenia, muscle weakness, weakness, muscle fatigue, weight loss, cachexia, functional decline, osteoporosis, sclerosis, kyphosis, reduction in bone density, cognitive decline, neurological decline, cognitive deficit, cognitive impairment, mild cognitive impairment, depression, degenerative diseases, neurodegenerative diseases, motor-associated neurodegenerative diseases, motor neuron disease, motor neuron dysfunction, amyotrophic lateral sclerosis (ALS), primary lateral sclerosis, progressive muscular atrophy, age-related muscular atrophy, age-related fat loss, progressive bulbar palsy, progressive supranuclear palsy, pseudobulbar palsy, hereditary spastic paraplegia, Parkinson's disease, parkinsonism, Multiple System Atrophy (MSA), Progressive Supranuclear Palsy (PSP), essential tremor, resting tremor, Alzheimer's disease, Huntington's disease, spinocerebellar ataxias, Friedreich's ataxia, cerebellar ataxia, dysautonomia, dementia, frontotemporal dementia, chronic traumatic encephalopathy, memory loss, aged cognition, age/aging related cognitive decline/impairment, congential epilepsy, Batten disease, polyglutamine diseases, atherosclerosis, atherosclerotic plaque in a blood vessel, arteriosclerosis, vascular stiffening, arterial stiffness, stiffened arteries, hypertension, cardiovascular disease(s), myocardial infarction, acute myocardial infarction, angina, arrhythmia, cardiomyopathy, congestive heart failure, coronary artery disease, carotid artery disease, endocarditis, coronary thrombosis, myocardial infarction, ischemia reperfusion injury, anemia, hypertension, aortic aneurysm, cardiac diastolic dysfunction, irregularity in heart rhythm, decrease in cardiac stress tolerance, increase in the cross-sectional area of cardiomyocyte(s), hypercholesterolemia, hyperlipidemia, mitral valve prolapsed, peripheral vascular disease, cardiac stress resistance, brain aneurysm, inflammatory or autoimmune disease, cerebrovascular disease, stroke, heart failure, heart failure with preserved ejection fraction, fibrosis, idiopathic pulmonary fibrosis (IPF), pulmonary fibrosis, fibrotic disease, cardiac fibrosis, liver fibrosis, pancreatic fibrosis, oral submucosa fibrosis, cystic fibrosis, gum recession, gingival recession, oral mucositis, pulmonary disease, age-related loss of pulmonary function, chronic obstructive pulmonary disease, emphysema, bronchiectasis, coronary artery disease, hypercholesterolemia, liver disease, fatty liver disease, lysosomal storage disease, amyloidosis, systemic sclerosis, kidney disease, chronic kidney disease, renal disease, renal failure, end-stage renal disease (ESRD), renal insufficiency, glomerulosclerosis, cirrhosis, hepatic cirrhosis, hepatic insufficiency, immunosenscence, clonal hematopoiesis, Chronic Obstructive Pulmonary Disease (COPD), emphysema, breathlessness, asthma, hypertension, hypercholesterolemia, age-related thymic atrophy, chronic inflammatory disease(s), joint pain, arthritis, osteoarthritis, osteoarthritis of knee(s), arthritis (Osteo- and Rheumatoid), Juvenile Rheumatoid Arthritis (JRA), arthrosis, herniated intervertebral disc, kyphosis, degenerative disc disease, vertebral disc degeneration, tendinopathy, androgenetic alopecia, male-pattern baldness, hair loss, Idiopathic Pulmonary Fibrosis, systemic sclerosis, Psoriasis, age-related loss of cardiac/pulmonary/cognitive/vision function, decrease in cardiac stress tolerance, insulin sensitivity, poor glycemic control, diabetes, type 1 diabetes, type 2 diabetes, diabetic ulcer, diabetic retinopathy, diabetic neuropathy, diabetic nephropathy (diabetic kidney disease), diabetic ulcer, boutonneuse fever, obesity, metabolic disease/syndrome/dysfunction, inflammatory bowel disease, andropause, glaucoma, progressive glaucoma, retinal degeneration, sarcopenia, cachexia, age-related cachexia and/or sarcopenia, macular degeneration, Age-related Macular Degeneration (AMD, early/intermediate/late), age-related wet macular degeneration, neovascular/wet AMD, dry age-related macular degeneration, dry AMD, Geographic atrophy (GA), dry age-related macular degeneration with geographic atrophy, wet and dry AMD in the same eye(s), Stargardt's macular degeneration, Best vitelliform macular dystrophy, retinopathy, diabetic retinopathy, proliferative diabetic retinopathy, diabetic macular edema, age/aging-related eye disease, ophthalmological/ophthalmic disease/disorder/condition, ocular disease, vision loss, blindness, progressive vision impairment, myopia (short-sightedness), degenerative myopia, hyperopia (far-sightedness), accommodative dysfunction, cataract formation, cataract(s), retinal degeneration, progressive retinal degeneration, presbyopia, vision loss, retinitis pigmentosa, leber hereditary optic neuropathy, Fuchs spot, Best's disease, Sorsby's fundus dystrophy, vaso-obliteration in eye(s), oxygen induced vaso-obliteration, neovascularization in eye(s), hearing loss (e.g. age-related), deafness, presbycusis, tinnitus, naive T cell shortage, movement disability, nonalcoholic fatty liver disease (NAFLD), nonalcoholic steatohepatitis (NASH), immunosenescence, immune senescence, poor immune response to a vaccine(s) (so countering this improves vaccine response=improves the protection conferred by a vaccine), respiratory/urinary tract infection (RTI/UTI) especially in older/aged/elderly subjects, loss of bladder control, lower urinary tract symptoms (LUTS), Benign Prostatic Hyperplasia (BPH), hyperplasia, polycystic kidney disease, cancer, age-related cellular hypertrophy, dermatological disease/disorder, eczema, psoriasis, hyperpigmentation, nevi, rashes, atopic dermatitis, urticaria, diseases/disorders related to photosensitivity/photoaging, rhytides, pruritis, dysesthesia, eczematous eruptions, eosinophilic dermatosis, reactive neutrophilic dermatosis, pemphigus, pemphigoid, immunobullous dermatosis, fibrohistocytic proliferations of skin, cutaneous lymphomas, cutaneous lupus, a hallmark(s) of aging, genomic instability, telomere attrition, epigenetic alteration(s), loss of proteostasis, deregulated nutrient sensing, mitochondrial dysfunction, cellular senescence, stem cell exhaustion, altered intercellular communication, homeostatic imbalance, reduced fitness, reduced reproductive fitness, infertility, female infertility, menopause, incontinence, sleep disturbances, imbalance, fear, depression, ulcers.

[1224] A method of any of Claims 33-53 and/or a pharmaceutical/dermopharmaceutcal/cosmetic/supplement composition/medicament/peptide/protein/vector/gene therapy of any of Claims 24, 31, 54, wherein the unwanted/undesirable aspect(s)/sign(s) of aging and/or disorder(s)/disease(s) of aging includes (to illustrate and not restrict) accelerated/premature aging, any accelerated/premature aging disease, any progeroid syndrome, including (to illustrate and not restrict) premature aging because of chemo-/radio-/cancer therapy, Werner syndrome, Bloom syndrome, De Barsy syndrome, Rothmund-Thomson syndrome, Cockayne syndrome, xeroderma pigmentosum, trichothiodystrophy, combined xeroderma pigmentosum-Cockayne syndrome, restrictive dermopathy, Wiedemann-Rautenstrauch syndrome, Hutchinson-Gilford progeria syndrome (progeria), a laminopathy, Ataxia telangiectasia-like disorder 2, XFE progeroid syndrome, Muscular dystrophy, Muscular Dystrophy (Becker's, Duchenne, Limb-Girdle), Yamamoto's Muscular Dystrophy, Mandibuloacral dysplasia, Dilated cardiomyopathy, GAPO syndrome, Cutis laxia, Ehlers-Danlos syndrome, Lenz-Majewski hyperostatic dwarfism, SHORT syndrome, Progressive external opthalmoplegia, Nester-Guillermo progeria syndrome, MDPL syndrome, Dyskeratosis congenital, Down syndrome.

### Sequence Variants

[1225] In one or more of Claims 1-58, “sequence variant” has ≥z % sequence identity, wherein z is a number between 27.9 and 100, for example selected from a group comprising 28, 29, 30, 31, 32, 33, 34, 35, 36, 37, 38, 39, 40, 41, 42, 43, 44, 45, 46, 47, 48, 49, 50, 51, 52, 53, 54, 55, 56, 57, 58, 59, 60, 61, 62, 63, 64, 65, 66, 67, 68, 69, 70, 70.5, 71, 71.5, 72, 72.5, 73, 73.5, 74, 74.5, 75, 75.5, 76, 76.5, 77, 77.5, 78, 78.5, 79, 79.5, 80, 80.5, 81, 81.5, 82, 82.5, 83, 83.5, 84, 84.5, 85, 85.5, 86, 86.5, 87, 87.5, 88, 88.5, 89, 89.5, 90, 90.5, 91, 91.5, 92, 92.5, 93, 93.5, 94, 94.5, 95, 95.5, 96, 96.5, 97, 97.5, 98, 98.5, 99, 99.5.

[1226] In one or more of Claims 1-58, “sequence variant” has ≥28% sequence identity.

[1227] In one or more of Claims 1-58, “sequence variant” has ≥30% sequence identity.

[1228] In one or more of Claims 1-58, “sequence variant” has >40% sequence identity.

[1229] In one or more of Claims 1-58, “sequence variant” has ≥50% sequence identity.

[1230] In one or more of Claims 1-58, “sequence variant” has ≥60% sequence identity.

[1231] In one or more of Claims 1-58, “sequence variant” has >70% sequence identity.

[1232] In one or more of Claims 1-58, “sequence variant” has >75% sequence identity.

[1233] In one or more of Claims 1-58, “sequence variant” has ≥80% sequence identity.

[1234] In one or more of Claims 1-58, “sequence variant” has ≥85% sequence identity.

[1235] In one or more of Claims 1-58, “sequence variant” has ≥90% sequence identity.

[1236] In one or more of Claims 1-58, “sequence variant” has ≥95% sequence identity.

[1237] In one or more of Claims 1-58, “sequence variant” has ≥96% sequence identity.

[1238] In one or more of Claims 1-58, “sequence variant” has >97% sequence identity.

[1239] In one or more of Claims 1-58, “sequence variant” has ≥98% sequence identity.

[1240] In one or more of Claims 1-58, “sequence variant” has ≥99% sequence identity.

[1241] In one or more of Claims 1-74, where a “sequence variant”, which is an amino acid sequence, is referred to, this is functional i.e. it (and/or some fragment(s) of it) can inhibit/reduce F₁F₀ ATP hydrolysis (e.g. inside a cell, preferably a eukaryote cell, and/or in a Sub-Mitochondrial Particle (SMP) assay of the art, which assays F₁F₀ ATP hydrolysis [functional in an SMP assay with native IF1 protein removed and/or present]), optionally/preferably wherein it has greater inhibitory activity against F₁F₀ ATP hydrolysis than a naturally occurring IF1 protein at pH 8;
[1242] and/or where a “sequence variant”, which is a polynucleotide sequence, is referred to, it codes for a functional amino acid sequence variant of the present claim: aforementioned in the present claim;
[1243] optionally, where “sequence variant” is written in Claims 1-74, this is substituted with “functional sequence variant”.

[1244] In one or more of Claims 1-75, where a “fragment” (or sequence variant of a fragment), which is an amino acid sequence, is referred to, this is functional i.e. it (and/or some fragment(s) of it) can inhibit/reduce F₁F₀ ATP hydrolysis (e.g. inside a cell, preferably a eukaryote cell, and/or in a Sub-Mitochondrial Particle (SMP) assay of the art, which assays F₁F₀ ATP hydrolysis [functional in an SMP assay with native IF1 protein removed and/or present]), optionally/preferably wherein it has greater F₁F₀ ATP hydrolysis inhibitory activity than a naturally occurring IF1 protein at pH 8.

### Scope

[1245] Where an amino acid/nucleotide sequence is presented, and/or referred to, herein, in alternative embodiments, this presentation/referral is of/to one or more of a “sequence variant” thereof, a fragment thereof (or concatenated fragments thereof), a “sequence variant” of a fragment thereof (or a “sequence variant” of concatenated fragments thereof).

### Sequence Variant Thereof

[1246] For an amino acid/nucleotide sequence of/in this disclosure, where the term “sequence variant”/“variant” is used/applies in relation to it, in some different (non-limiting) embodiments:
[1247] “sequence variant” has ≥28% sequence identity to the sequence;
[1248] “sequence variant” has ≥30% sequence identity to the sequence;
[1249] “sequence variant” has >40% sequence identity to the sequence;
[1250] “sequence variant” has ≥50% sequence identity to the sequence;
[1251] “sequence variant” has ≥60% sequence identity to the sequence;
[1252] “sequence variant” has ≥70% sequence identity to the sequence;
[1253] “sequence variant” has ≥75% sequence identity to the sequence;
[1254] “sequence variant” has ≥80% sequence identity to the sequence;
[1255] “sequence variant” has ≥85% sequence identity to the sequence;
[1256] “sequence variant” has ≥90% sequence identity to the sequence;
[1257] “sequence variant” has ≥95% sequence identity to the sequence;
[1258] “sequence variant” has ≥96% sequence identity to the sequence; “sequence variant” has ≥97% sequence identity to the sequence; “sequence variant” has ≥98% sequence identity to the sequence; “sequence variant” has ≥99% sequence identity to the sequence;
[1259] “sequence variant” has >z % sequence identity to the sequence, wherein z is a number between 27.9 and 100, for example selected from a group comprising 28, 29, 30, 31, 32, 33, 34, 35, 36, 37, 38, 39, 40, 41, 42, 43, 44, 45, 46, 47, 48, 49, 50, 51, 52, 53, 54, 55, 56, 57, 58, 59, 60, 61, 62, 63, 64, 65, 66, 67, 68, 69, 70, 70.5, 71, 71.5, 72, 72.5, 73, 73.5, 74, 74.5, 75, 75.5, 76, 76.5, 77, 77.5, 78, 78.5, 79, 79.5, 80, 80.5, 81, 81.5, 82, 82.5, 83, 83.5, 84, 84.5, 85, 85.5, 86, 86.5, 87, 87.5, 88, 88.5, 89, 89.5, 90, 90.5, 91, 91.5, 92, 92.5, 93, 93.5, 94, 94.5, 95, 95.5, 96, 96.5, 97, 97.5, 98, 98.5, 99, 99.5;
[1260] where a “sequence variant”, which is an amino acid sequence, is referred to herein, in preferred embodiments this is functional i.e. it (and/or some fragment(s) of it) can inhibit/reduce F₁F₀ ATP hydrolysis (e.g. inside a cell, preferably a eukaryote cell, and/or in a Sub-Mitochondrial Particle (SMP) assay of the art, which assays F₁F₀ ATP hydrolysis [functional in an SMP assay with native IF1 protein removed and/or present]), optionally/preferably wherein it has greater F₁F₀ ATP hydrolysis inhibitory activity than a naturally occurring IF1 protein at pH 8;
[1261] where a “sequence variant”, which is a polynucleotide sequence, is referred to herein, in preferred embodiments it codes for a functional amino acid sequence, as referred to immediately above;
[1262] where “sequence variant” is written in this disclosure, in preferred embodiments this is substituted with “functional sequence variant”;
[1263] an esterified (on one or more carboxyl groups) derivative of a peptide/protein of this disclosure can be categorized within the scope of a “sequence variant”, because the amino acid sequence is changed, all be it reversibly because the sequence reverts after the peptide/protein passes into a cell and esterases cleave off the group(s), joined to one or more carboxyl groups, by ester bond(s).

### Fragment Thereof

[1264] For an amino acid sequence of/in this disclosure, where the term fragment (or sequence variant of a fragment) is used/applies in relation to it,
[1265] in some preferred embodiments this is functional i.e. it (and/or some fragment(s) of it) can inhibit/reduce F₁F₀ ATP hydrolysis (e.g. inside a cell, preferably a eukaryote cell, and/or in a Sub-Mitochondrial Particle (SMP) assay of the art, which assays F₁F₀ ATP hydrolysis [functional in an SMP assay with native IF1 protein removed and/or present]), optionally/preferably wherein it has greater F₁F₀ ATP hydrolysis inhibitory activity than a naturally occurring IF1 protein at pH 8;
[1266] in some embodiments, a fragment of a sequence refers to a shorter sequence by the removal of one or more amino acids, wherein these can be removed from one or both ends and/or at one or more internal places in the sequence.

### Cell Penetrating Peptides (CPPs)

[1267] For the CPP component of a fusion protein of this disclosure, the incorporation of any CPP(s) of the art is contemplated by, and componentry to, this disclosure. There are many CPPs of the art: some of which, >1,800, are disclosed in and its associated online database [“CPPsite”, presently at https://webs.iiitd.edu.in/raghava/cppsite].

[1268] Tat (U.S. Pat. Nos. 5,670,617, 5,747,641, 5,804,604, 5,674,980, 6,316,003B1) as the selected CPP, bound to the cargo peptide/protein by a peptide bond, can transport an IF1 protein sequence, or sub-sequence thereof, into cells (US2004/0072739A1, US2003/0026781A1, therein Tat is used with flanking glycine residues on one or both sides of the Tat sequence, as also used in [198]). Use of Tat as the CPP is one of the preferred embodiments herein. Tat can transport large proteins into cells, but in some preferred embodiments it is used to transport a functional IF1 protein fragment instead of a complete IF1 protein (non-limiting e.g. one of 1-60, 10-60, 10-47, 14-47, 14-46, 14-45, 14-44, 14-43, 14-42 or 42-58 IF1 protein residues, “mature” [without MIS] bovine IF1 protein numbering, or equivalent/aligned residues of a different IF1 protein from a different species). Incidentally, “TAT fusion peptides with cargos of <50 amino acids were rapidly taken up (within 3-5 min) and distributed throughout the cell, whereas TAT fusion proteins of >50 amino acids were mainly endocytosed and trapped largely in cytoplasmic vesicles” [199]. TAT₄₇₋₆₀ is the full Tat sequence, but there are shorter truncated versions known to those of the art. A notable Tat version ends in two proline residues (PP), which is good to have at the end of a CPP sequence, at the point of peptide bonded connection to the cargo sequence, for flexibility between these two domains.

[1269] A preferred CPP to use, especially in humans, is a CPP that has already been safely administered to one or more humans: preferably wherein it was used to carry a cargo sequence/compound, preferably as part of a licensed (e.g. FDA/EMA) drug and/or during a clinical trial (ideally wherein it passed at least Phase I trials). For non-limiting example, fulfilling the clinical trial aspect, is R7 (linked to cargo sequence by a pH sensitive linker [192], U.S. Pat. No. 6,730,293B1, applied to skin, Phase IIb discontinued because the pH sensitive linker didn't release the cargo as desired: “release of the free drug was not rapid enough to compete with clearance” [200], but it did pass Phase I trials for safety, and could passage the skin). Also, Tat (linked to PKC inhibitor cargo by disulphide bond, via added cysteine, —C—YGRKKRRQRRR [SEQ ID NO:449], in KAI-9803, Phase II completed, [201-202], U.S. Pat. No. 7,393,835B2, U.S. Pat. No. 7,507,711B2, U.S. Pat. No. 7,833,984B2), retroinverse Tat (bound by peptide bond in D-JNKI-1 [AM-111], which is in Phase III, [203], cargo-pprrrqrrkkrg [lower case denoting D-amino acid], U.S. Pat. No. 8,278,413B2, U.S. Pat. No. 8,183,339B1, U.S. Pat. No. 8,080,517B2) and PTD4 (in AXZ100, which has completed Phase IIa trials, [204], U.S. Pat. No. 8,974,774B2, U.S. Pat. No. 9,211,248B2).

[1270] R7 has the added advantage that it also corresponds to a sequence found within the human {and mouse} proteome (R7 sequence is found within a number of human proteins, findable by using BLAST). So, in humans, R7 is more likely to be safe, with less immunogenicity, than a sequence not found in humans. It also has the marketability, e.g. to a regulatory body and/or the public (e.g. when componentry to a cosmetic for slowing skin aging), of being a “natural” sequence (especially when attached to a human IF1 protein sequence, which is also a “natural” sequence, or a fragment/derivative thereof; or, in fact, to an IF1 protein sequence from another species, non-limiting e.g. bowhead whale). Penetratin also corresponds to a sequence found in humans (in a number of homeobox proteins). But it hasn't been used in humans to date. R7 has the further advantage that it confers superior cellular penetration than Tat or penetratin (e.g. when each is attached to the cargo sequence by introduced cysteines and a disulphide bond—twice as good [205], U.S. Pat. No. 6,730,293B1), wherein some longer poly-Arginine sequences than R7 can penetrate cells better [205], and some (e.g. R12) can be found within one or more human proteins. A poly-Arginine component to a fusion protein can be used to purify said fusion protein [207], wherein the fusion protein can be released from the immobilized negative resin by raising the pH sufficiently such that arginine loses its positive charge. To note, wherein amino acid count is in brackets, R7(7) is a shorter sequence than Tat (9 to 13) or penetratin (16). In [208], retroinverse penetratin has been associated with some cellular toxicity, but not the retroinverse of Tat, wherein the authors of that paper speculate this might be because Tat is shorter, and the toxicity of a retroinverse sequence correlates with its length (their speculation). Retroinverse penetratin (a variant with the amino acid(s) that have a chiral centre in their side chain swopped for another without this property) has greater cellular penetration than penetratin [209], which is likely a function of greater stability to protease action, because of its componentry D-, instead of L-, amino acids. The use of penetratin, and/or a penetratin variant(s)/derivative(s), e.g. from U.S. Pat. No. 6,992,169B2, with a cargo sequence herein, optionally wherein the cargo sequence is shorter than 100 amino acids, is hereby contemplated.

[1271] A preferred CPP to use is R7 (is clinically validated), or other poly-Arginine (or polymer of arginine and/or one or more arginine analogues) longer than 5 residues, preferably shorter than 50 residues, optionally less than 16 residues, attached to the cargo sequence by a peptide or disulphide bond, the latter courtesy of a cysteine introduced into the CPP and another cysteine introduced into, or already in, the cargo sequence ([205], U.S. Pat. No. 7,393,835B2, U.S. Pat. No. 7,507,711B2, U.S. Pat. No. 7,833,984B2, U.S. Pat. No. 6,730,293B1), optionally wherein one or more arginine residues are D-amino acids, optionally at least 50% of them, optionally all of them, optionally wherein the sequence (just the CPP and/or the cargo sequence) is retroinverse. For example, RRRRRRRC-C [cargo] or rrrrrrrC-C [cargo] or rrrrrrrc-c [cargo], i.e. SEQ ID NO:459 concatenated to [cargo], where lower case denotes D-amino acid. When R7, or other favoured poly-Arginine, is bound to the cargo sequence by a peptide bond, a linker/spacer sequence between, optionally comprising one or more (preferably less than 5, ideally 1 to 2) glycine and/or proline residues, optionally a cleavable linker sequence (e.g. cleavable by a ubiquitous enzyme(s) such as an esterase {e.g. a linker containing a carboxylic acid ester}, amidase, or the like, working to the assumption that the concentration of such an enzyme(s) is higher inside than outside cells in the extracellular milieu, refer U.S. Pat. No. 9,255,124B2 for more on such linkers, pH dependent and other linkers in U.S. Pat. No. 6,730,293B1), is componentry to this disclosure. If one of the art cannot work a most/more favoured option (e.g. R7) they should experiment with another option(s) herein (e.g. R7 with one or more flanking glycines, e.g. a Tat sequence e.g. a Tat sequence with flanking glycines e.g. YGRKKRRQRRRG [SEQ ID NO:446] or GYGRKKRRQRRRG [SEQ ID NO:445]). Notably, R7 followed by a glycine, RRRRRRRG [SEQ ID NO:461], is a sequence found within the human (and mouse) proteome (e.g. in tight junction protein ZO-1 isoform X1 in human), and so can in some sense be said to be a “natural” sequence in humans, whilst its R7 component has clinical safety precedent, and this is a preferred CPP sequence to use in this disclosure. R7 followed by a proline is also found within the human (and mouse) proteome (e.g. in alpha adrenergic receptor subtype alpha 1a in human) and is another preferred CPP sequence. Longer poly-arginine sequences (up to R50), flanked on one or both sides with one or more glycine and/or proline residues, are also contemplated for use as a CPP sequence herein.

[1272] More broadly, the most favoured CPPs to use, especially when administering to a human subject(s), are, in decreasing order of preference, poly-Arginine (preferably, where n is the number of arginine residues, n≥5, more preferably n≥6, more preferably 50≥n≥6, optionally 15≥n≥6, optionally R7 or R8 or R9, and/or variant thereof) and/or Tat (and/or variant thereof) and/or penetratin (and/or variant thereof), attached to the cargo by peptide/ester bond (for example ester bonded to the C-terminus), or a disulphide bond conferred by a cysteine introduced into the CPP sequence (preferably at its N- or C-terminal ends) and a cysteine naturally in (or introduced/substituted into) the cargo sequence (optionally at its N- or C-terminal ends), wherein the aforementioned variants can (for non-limiting example) be the sequence in reverse, and/or have one or more D in place of L-amino acids, or be the retroinverse sequence, and/or have one or more (up to 10, preferably less than 5, more preferably no more than 3) flanking glycine and/or proline residues on one or both ends. Variants with D-instead of L-amino acids tend to have greater stability, being less susceptible to proteases, and so confer greater penetration and cargo delivery into cells [when serum is present] ([206], U.S. Pat. No. 6,730,293B1).

[1273] When the CPP is attached to the cargo sequence by a disulphide bond, this breaks within the reducing intracellular environment, releasing the cargo after the CPP has passaged it across the plasma membrane. When the CPP is attached by a peptide bond to a Mitochondrial Import Sequence (MIS), connected to an IF1 protein/fragment (or sequence variant thereof), then the CPP directs this fusion protein across the plasma membrane, the MIS then directs this fusion protein into the mitochondrial matrix, thereafter the MIS is enzymatically cleaved (and the CPP at its N-terminal end with it), leaving the IF1 protein/fragment (or sequence variant thereof) unencumbered inside the mitochondrial matrix. The latter, linkage by peptide bond, is more favoured than linkage by disulphide bond because it doesn't have the problem of “disulfide bond exchange” (U.S. Pat. No. 9,255,124B2), wherein a disulphide bond between CPP and cargo is replaced by a disulphide bonds between two CPP sequences and two cargo sequences, wherein these cargo sequences, without a CPP, don't have the capacity to cross a plasma membrane, and the amount of conjoined (effective) CPP-cargo in the sample is reduced. What can reduce this effect, if not already present, is to insert at least one aliphatic residue (e.g. alanine, valine, leucine, isoleucine) next to one or both of the cysteines, on one or (if the cysteine is not at an N- or C-terminal end) both sides, and wherever a cysteine is specified in a sequence herein, and is involved in a disulphide bond, in further embodiments, at least one aliphatic residue is inserted/substituted as aforementioned. Notably a cysteine that is internal to a sequence, instead of at the N- or C-terminal ends, is less likely to be affected by this “disulfide bond exchange” effect, and if both cysteine residues in the disulphide bond are internal to their sequence, the chance is lower still, and this effect can be reduced further by including one or more excipients disclosed in U.S. Pat. No. 7,265,092B2 in the pharmaceutical composition (e.g. mannitol).

[1274] Administration via skin is contemplated, wherein Tat, R7, penetratin, and some other CPPs, have been shown to confer penetration of a cargo sequence through skin [210]. Optionally, when administered by skin, the skin is microporated (US20100311671A1). Protein/peptide conjugation with a fatty acid, palmitic acid (palmitoylation) or similar, which helps peptides go through the skin barrier, is contemplated. Administration to skin is especially good for local/constrained administration to that part of skin, without much systemic exposure at all, because many of these cell-permeable fusion proteins herein, when administered by skin, don't travel too far into the body before arriving in conditions that cause them to release their cargo, wherein the cargo, when it is an IF1 protein/fragment (or sequence variant thereof), cannot pass a plasma membrane after its CPP element has dropped it off. Administration to the eye is also contemplated, wherein a poly-Arginine CPP can deliver a cargo peptide to the eye, especially with an optimized pharmaceutical composition for eye delivery (e.g. refer U.S. Pat. No. 8,729,010B2 and references therein).

[1275] If desired, greater penetration of these fusion proteins, for example into the skin, can be conferred by using an “activatable CPP”, wherein the fusion protein contains a polyanionic sequence that prohibits cellular entry conferred by its CPP (which can, for example, be a poly-Arginine sequence, e.g. R8), wherein this “anchor domain”, preventing cellular entry, can be cleaved off by some external stimuli, e.g. by the action of an extracellular protease(s). This approach has some precedent, including in the clinic: [211-213], U.S. Pat. No. 9,695,251B2, U.S. Pat. No. 7,985,401B2, U.S. Pat. No. 10,385,380B2, U.S. Pat. No. 10,596,259B2, US2006/0041105A1, US2012/0134922A1, US2015/0359902A1, WO2005/042034A1, WO2011/008996A2.

[1276] In some embodiments, a poly-arginine that has L- and D-amino acids alternate in the sequence is used as the CPP e.g. RrRrRrR [SEQ ID NO:460], where lower case denotes D-amino acid. In other embodiments, the used CPP is a string of L- and/or D-arginine residues, up to 50 residues long, optionally less than 16 amino acids, punctuated at one or more points, and/or flanked on one or both sides, with one or more independently selected L- and/or D-hydrophobic amino acids, each preferably with a hydrophobicity equal or greater than phenylalanine, even more preferably with a hydrophobicity equal or greater than cyclohexylalanine. In particular embodiments, one or more L- or D-arginine residues (e.g. a string of 7) alternates with one or more independently selected hydrophobic amino acids, for 1-30 repeats.

[1277] The use of a lipidated CPP is contemplated. For (non-limiting) example, a poly-Arginine CPP (e.g. R7 or R8) with a fatty acid (saturated or unsaturated, straight-chain or branched, with between 2 and 100 carbon atoms, preferably with between 2 and 25 carbon atoms) acylated to its N-terminal end [214-215]. In some embodiments, if a fusion protein of/in this disclosure, contains at least one CPP sequence, a fatty acid moiety can be conjoined to one or more amino acid side-chains in the CPP sequence, preferably to just one, optionally to a present/introduced lysine residue (e.g. acylated to its side-chain), and/or, if this CPP sequence is at the N-terminal end of the fusion protein, a fatty acid moiety can be conjoined/acylated to its N-terminus.

[1278] The table below presents some non-limiting examples of Cell Penetrating Peptides (CPPs) of the art [upper case letter reflects L-amino acid, lower case reflects D-amino acid; any presented L-amino acid or D-amino acid is, in other embodiments, contemplated to be the other, all possible L- and D-amino acid combinations are contemplated, the reverse sequences also contemplated, and the retroinverse sequences]. Use of one or more of these (and/or of another(s) of the art), as taught herein for a CPP, is componentry to this disclosure. Each can be attached at the N- or C-terminus of the cargo protein/peptide in either orientation (forward or reverse). Optionally attached via a covalent (preferably peptide) bond, optionally via a linker/spacer sequence, optionally comprising one or more glycine and/or proline residues, or by a cysteine pair, between the CPP and cargo sequences, linked by a disulphide bond (e.g. refer linker in WO2018232491A1), or by a photocleavable (U.S. Pat. No. 8,729,010B2) or pH sensitive linker (U.S. Pat. No. 6,730,293B1,) [192]) or “self-immolative” (U.S. Pat. No. 10,624,968B2) linker or protease(s) sensitive linker, or connected in some other way (non-limiting e.g. further linkers given in U.S. Pat. No. 8,729,010B2 and references therein). Optionally, via a cysteine residue added at the N- or C-terminus of a CPP sequence, which can be attached by a disulphide bond to a cysteine (optionally inserted/substituted) at the N- or C-terminus, or within, the cargo sequence. A sub-sequence of a CPP sequence and/or reverse sequence of a CPP sequence and/or a CPP sequence with one or more constituent L-amino acids replaced with their corresponding D-amino acids (reduces susceptibility to proteases e.g. in the blood) and/or the retroinverse sequence of a CPP sequence and/or a CPP sequence with modification at its N- or C-terminal ends (preferably a modification known to those of the art, non-limiting e.g. acylation (e.g. acetylation) at the N-terminus, amidation at the C-terminus, cholesteryl moiety attached by an ester bond to C-terminus [e.g. as in [209]], modifications that remove charge and/or increase lipophibicity are especially favoured), in use as a CPP sequence, is hereby contemplated. When a retroinverse (part[s] or entirety) sequence is used, optionally amino acids with a chiral centre in their side-chain (isoleucine and threonine) are replaced with an amino acid without this feature (e.g. valine), and/or proline residues are removed or replaced with a different amino acid [209]. In the table below is such a retroinverse sequence of Penetratin (with I replaced with V). The use of a CPP of 5 to 51 amino acids, of which at least 50% are arginine, optionally/preferably comprising one or more regions of 5 or more contiguous arginine residues, is componentry to this disclosure. By the teaching of this disclosure, further CPP sequences can be found by searching for very arginine rich motifs within proteins, preferably from human. Some further CPPs for use as part of this disclosure can be found in one or more of US2008/0234183A1, US2014/0140929A1, WO 01/96369A1, U.S. Pat. No. 10,287,331, US2008/0234183A1, US2014/0140929A1, US2003/0032593A1, WO97/12912, WO2007/108749A1, U.S. Pat. No. 8,974,774B2, U.S. Pat. No. 9,211,248B2, U.S. Pat. No. 7,049,286B2, U.S. Pat. No. 8,410,045B2, WO2009/036092A2, U.S. Pat. No. 10,293,020B2, WO2013/086020A1, U.S. Pat. No. 10,287,331B2, WO2007108749A1, U.S. Pat. No. 10,626,147B2 or a cited/citing/related paper/patent or application thereof, or in the “CPPsite” database ([197]) of CPPs at https://webs.iiitd.edu.in/raghava/cppsite, or elsewhere in the literature. Cyclic CPPs are herein contemplated e.g. refer to U.S. Pat. No. 10,626,147B2, US 2019/0309020A1, US2017/0355730A1. Tat as used herein typically refers to that found in HIV-1. But the use of a Tat sequence from a different virus is also contemplated, non-limiting examples of which include VP22 from HSV (WO97/05265; Elliott and O'Hare, Cell 88:223-233, 1997), HIV-2 (M. Guyader et al., “Genome Organization and Transactivation of the Human Immunodeficiency Virus Type 2”, Nature, 326, pp. 662-669(1987)), equine infectious anemia virus (R. Carroll et al., “Identification of Lentivirus TAT Functional Domains Through Generation of Equine Infectious Anemia Virus/Human Immunodeficiency Virus Type 1 TAT Gene Chimeras”, J. Virol., 65, pp. 3460-67(1991)), and simian immunodeficiency virus (L. Chakrabarti et al., “Sequence of Simian Immunodeficiency Virus from Macaque and Its Relationship to Other Human and Simian Retroviruses”, Nature, 328, pp. 543-47(1987); S. K. Arya et al., “New Human and Simian HIV-Related Retroviruses Possess Functional Transactivator (tat) Gene”, Nature, 328, pp. 548-550(1987)). The use of multiple CPPs, which can all be the same (e.g. dimer, trimer etc.) or be more than one type, is herein contemplated. Indeed, this has clinical precedent in the macromolecule transport system (MTS), comprising a positively charged lysine-rich central domain inbetween two TAT49-57 domains, enabling large molecules to cross the skin, used by Revance Therapeutics Inc. to get botulinum toxin type A into human skin in clinical trials (U.S. Pat. No. 9,211,248B2, US2007/0077259A1, US2008/0038203A1, US2010/0093639A1). Multimers with a plurality of CPP sequences and/or a plurality of cargo sequences are contemplated. The use of any Diatos Peptide Vector (DPV)/VectoCell® (e.g. U.S. Pat. No. 8,410,045B2) as the CPP element of a fusion protein of this disclosure is herein contemplated. When using a fusion protein of this disclosure for anti-cancer activity, in some embodiments its selected CPP element has intrinsic anti-cancer utility in and of itself e.g. p28 [216], which is presently in clinical trials for anti-cancer use. Using CAMP as the CPP confers both a CPP and a Mitochondrial Import Sequence (MIS), negating the need for a MIS. For mitochondrial targeting, use of the MIS component of CAMP (LLRAALRKAAL fragment of SEQ ID NO:452) with a different CPP (e.g. polyarginine e.g. R7) in fusion proteins of this disclosure is contemplated, wherein this MIS is advantageously short (11 residues). Some sequences with high sequence identity to a known CPP are also likely to be a CPP, and their use (one or more) as a CPP in fusion proteins of this disclosure is contemplated. Any amino acid sequence/chemical moiety (or plural thereof) that can transport a cargo amino acid/nucleotide sequence across a cell membrane can be incorporated as the CPP component of a fusion protein of this disclosure. In alternative fusion protein embodiments of this disclosure, at least one Cell-Penetrating poly(Disulfide) (CPD) moiety and/or Skin Penetrating Peptide (SPP, e.g. one or more SPPs found in one or more of U.S. Pat. No. 7,659,252B2, U.S. Pat. No. 8,791,062B2, U.S. Pat. No. 9,642,895B2, US2014/0161871A1, US2014/0227174A1, US2015/0025221A1, US2017/0258930A1, WO2007/035474A2, WO2014/123543A2, WO2016/033314A1, WO2017/048812A1, and/or in patents/patent applications that cite them, or that they cite) is used instead of, or in addition to, at least one CPP moiety.

| | SEQ | |
|---|---|---|
| | ID | |
| CPP | NO: | Sequence |
| TAT₄₇₋₆₀ | 440 | YGRKKRRQRRRPPQ |
| TAT₄₈₋₆₀ | 441 | GRKKRRQRRRPPQ |
| TAT₄₇₋₅₇ | 442 | YGRKKRRQRRR |
| TAT₄₈₋₅₇ | 443 | GRKKRRQRRR |
| TAT₄₉₋₅₇ | 444 | RKKRRQRRR |
| Flanking G | 445 | GYGRKKRRQRRRG |
| | 446 | YGRKKRRQRRRG |
| | 447 | GRKKRRQRRRPP |
| | 448 | YGRKKRRQRRRPP |
| | 449 | CYGRKKRRQRRR |
| | 450 | CRKKRRQRRR |
| | 451 | pprrrqrrkkrg |
| CAMP | 452 | YGRKKRRQRRRLLRAALRKAAL |
| R9-TAT | 453 | GRRRRRRRRRPPQ |
| PTD4 | 454 | YARAAARQARA |
| R7 | 455 | RRRRRRR |
| R8 | 456 | RRRRRRRR |
| R11 | 457 | RRRRRRRRRRR |
| | 458 | RRRRRRRC |
| | 459 | RRRRRRRCC |
| | 460 | RrRrRrR |
| Flanking G | 461 | RRRRRRRG |
| R6W3 | 462 | RRWWRRWRR |
| Penetratin | 463 | RQIKIWFQNRRMKWKK |
| | 464 | RRMKWKK |
| | 465 | NRRMKWKK |
| | 466 | QNRRMKWKK |
| | 467 | CRQIKIWFQNRRMKWKK |
| | 468 | Kkwkmrrnqfwvkvqr |
| VP22 | 469 | DAATATRGRSAASRPTERPRAPARSASRPRRPWD |
| DPV3 | 470 | RKKRRRESRKKRRRES |
| DPV6 | 471 | GRPRESGKKRKRKRLKP |
| DPV1047 | 472 | CVKRGLKLRHVRPRVTRMDV |
| DPV1047 | 473 | VKRGLKLRHVRPRVTRMDV |
| pVEC | 474 | LLIILRRRIRKQAHAHSK |
| ARF(1-22) | 475 | MVRRELVTLRIRRACGPPRVRV |
| ARF(19-31) | 476 | RVRVFVVHIPRLT |
| MPG | 477 | GALFLGFLGAAGSTMGAWSQPKKKRKV |
| MAP | 478 | KLALKLALKALKAALKLA |
| Transportan | 479 | GWTLNSAGYLLGKINLKALAALAKKIL |
| Transportan | 480 | AGYLIGKINLKALIAALAKKIL |
| 10 | | |
| | 481 | GWTLNSAGYLLG |
| | 482 | INLKALIAALAKKIL |
| Bip4 | 483 | VSALK |
| C105Y | 484 | CSIPPEVKENPFVYLI |
| Melittin | 485 | GIGAVLKVLTTGLPALISWIKRKRQQ |
| gH625 | 486 | HGLASTLTRWAHYNALIRAF |
| Pep-1 | 487 | KETWWETWWTEWSQPKKKRKV |
| Pep-7 | 488 | SDLWEMMMVSLACQY |
| BPrPr(1-28) | 489 | MVKSKIGSWILVLFVAMWSDVGLCKKRP |
| p28 | 490 | LSTAADMQGVVTDGMASGLDKDYLKPDD |
| VT5 | 491 | DPKGDPKGVTVTVTVTVTGKGDPKPD |
| Bac 7 | 492 | RRIRPRPPRLPRPRPRPLPFPRPG |
| (Bac₁₋₂₄) | | |
| PFVYLI | 493 | PFVYLI |
| NLS | 494 | CGYGPKKKRKVGG |
| KALA | 495 | WEAKLAKALAKALAKHLAKALAKALKACEA |
| P1 | 496 | MGLGLHLLVLAAALQGAWSQPKKKRKV |
| hCT | 497 | LGTYTQDENKFHTFPQTAIGVGAP |
| SynB1 | 498 | RGGRLSYSRRRESTSTGR |
| SynB3 | 499 | RRLSYSRRRF |
| SynB4 | 500 | AWSFRWSYRGISYRRSR |
| SW-40 (NLS) | 501 | PKKKRKW |
| SAP | 502 | WRLPPPWRLPPPWRLPPP |
| pISL | 503 | RVIRVWFQNKRCKDKK |
| GALA | 504 | WEAAIAEALAEALAEHLAEALAEALEALAA |
| N50 | 505 | WQRKRQKLM |
| pISL | 506 | RVIRVWFQNKRCKDKK |
| VT5 | 507 | DPKGDPKGWTWTVTWTVTGKGDPKPD |
| HN-1 | 508 | TSPLNIHNGQKL |
| Ku70 | 509 | WPMILKPMLKE |
| Buforin II | 510 | TRSSRAGLQFPWGRVHRLLRK |
| hCT (9-32) | 511 | LGTYTQDFNKFHTFPQTAIGVGAP |

### CPPs Comprising (Predominantly/Completely) Positively-Charged and Hydrophobic Residues

[1279] Any CPP comprising a number of positively charged residues, preferably arginine, wherein the majority, or all, the other residues are hydrophobic residues. Without seeking restriction by theory, the concentration of positive charges, particularly if due to arginine residues, confers cellular entry (into the negative inside cytoplasm), and the hydrophobic residues facilitate this. Wherein given that the mitochondrial inner membrane has a large negative inside (mitochondrial matrix) membrane potential across it (around −140 mV in normal cells, more hyperpolarized in cancer cells), a CPP with this character can tend to disproportionally accumulate its cargo in the mitochondrial matrix. So, such CPPs are sometimes termed Mitochondria Penetrating Peptides (MPPs) in the literature. Mitochondrial matrix localization of cargo is highly desirable in the use cases of this disclosure. The incorporation of any MPP (as a CPP) in a fusion protein of this disclosure is hereby contemplated. In some cases, the use of an MPP as the CPP can negate the need for a Mitochondrial Import Sequence (MIS) because the MPP confers not just cellular entry, but mitochondrial matrix localization also. Although use of MIS and MPP/CPP has the advantage that there is an enzyme that cleaves off the MIS (from the cargo sequence) in the mitochondrial matrix, and so if the MPP/CPP is N-terminal to the MIS, and the cargo C-terminal to the MIS, then the MPP/CPP is inherently cleaved off along with the MIS, and so the cargo is then unencumbered at its target destination. The use of a CPP with multiple positive charges, preferably 3, and more preferably 5 or more, preferably due to arginine residues, interspersed with (and/or adjacent to) one or more hydrophobic amino acid residues, optionally cyclohexylalanine (and/or other amino acid with an equivalent or greater log P), such that the log P of the CPP is greater than-3, and more preferably greater than-2.5, optionally wherein the CPP comprises a charge of +3 and a log P value of at least about-1.7, optionally wherein the CPP comprises a charge of +5 and a log P value of at least about-2.5, preferably wherein the CPP is less than 12 amino acids long, is componentry to this disclosure, wherein these characteristics tend to confer mitochondrial localization to the CPP and its cargo: as observed in [218-219] and U.S. Pat. No. 9,132,198B2 {and the papers/patents/patent applications that cite these}, wherein all MPP/CPP sequences therein are incorporated by reference into this disclosure).

[1280] Any CPP comprising a number of positively charged residues, preferably arginine, wherein the majority, or all, the other residues are hydrophobic residues except for a single glutamine (Q) residue, which is preferably located at an end of the sequence. CPP comprising (or consisting of) 3, 4, or 5 (or more) arginine residues, 2 or 3 (or more) hydrophobic residues, and a glutamine residue (preferably at an end of the sequence); in alternative embodiments, a plurality of glutamine residues (e.g. 2 or 3) is contemplated; in more preferred embodiments, no glutamine residue is present. Some CPP sequences in the literature have glutamine in them (e.g. [220-221]). But I think this is incorporated just to enable the conjugation of a dye, such that CPP intracellular localization can be tracked, rather than being an important component to the CPP sequence. Glutamine is not positively charged and is not hydrophobic. And so, by the teaching herein, is a drag to CPP performance, and so should be cut out of these CPP sequences to confer better CPP sequences.

[1281] SEQ ID NO:512 encompasses some CPP/MPP sequences of this disclosure (optionally with flanking glycine and/or proline residue[s] on one or both sides). In SEQ ID NO:512, Xaa, at each position within the residue range 3-22, is independently selected from: L-arginine, D-arginine, L-Lysine, D-lysine, L-phenylalanine, D-phenylalanine, L-tryptophan, D-tryptophan, L-tyrosine, D-tyrosine, L-glutamine, D-glutamine, L-phenylglycine, D-phenylglycine, 3,3-diphenyl-L-alanine, 3,3-diphenyl-D-alanine, L-3-cyclohexylalanine, D-3-cyclohexylalanine, L-3-(1-naphthyl) alanine, D-3-(1-naphthyl) alanine, L-3-(2-naphthyl) alanine, D-3-(2-naphthyl) alanine, L-2-aminooctanoic acid, D-2-aminooctanoic acid, O-Methyl-L-tyrosine, O-Methyl-D-tyrosine, 2,6-dimethyl-L-tyrosine, 2,6-dimethyl-D-tyrosine, or absent. In further embodiments, Xaa at each position within the residue range 3-22 of SEQ ID NO:512 is independently selected from its aforementioned options, but also from L-2,4,6-trimethylphenylalanine, D-2,4,6-trimethylphenylalanine, 2-cyclohexyl-L-glycine, 2-cyclohexyl-D-glycine, 3-benzo[b]thiophen-3-yl-L-alanine, 3-benzo[b]thiophen-3-yl-D-alanine, L-homophenylalanine, D-homophenylalanine, 4-fluoro-L-phenylalanine, 4-fluoro-D-phenylalanine, 4-chloro-L-phenylalanine, 4-chloro-D-phenylalanine, 3,4-difluoro-L-phenylalanine, 3,4-difluoro-D-phenylalanine, wherein all the options can optionally have 1 to 4 substituents, independently selected from alkyl and halogen. In alternative embodiments, in addition, more types of hydrophobic amino acid can also be selected from. For example, other amino acids with one or more of cyclo, diphenyl, naphthyl, or hexyl components. Amino acids can be sourced from chemical suppliers listed on the website www.labnetwork.com or well-known (to those of the art) chemical stockists such as Sigma-Aldrich, or by the guidance of a peptide synthesis company (some examples of which are given elsewhere herein). In some embodiments, tryptophan incorporation is disfavoured because it can have a negative impact upon pharmaceutical stability. SEQ ID NO:513 to SEQ ID NO:520 encompass increasingly narrower sub-sets of the sequence space of SEQ ID NO:512, always maintaining arginine, but soon dropping lysine, and iteratively dismissing the least hydrophobic of the hydrophobic residue options. A distinctive option is SEQ ID NO:520, which distinctively only contains natural amino acids (and D forms thereof). Preferred sequences of any of SEQ ID NO:512 to SEQ ID NO:520 have multiple positively charged, preferably arginine, residues (optionally wherein these are concentrated i.e. close to one another e.g. adjacent, e.g. not many residues apart) and one or more hydrophobic residues, wherein for the latter, in some embodiments, more hydrophobic residues are favoured over less hydrophobic residues. Some preferred sequences within and beyond SEQ ID NO:512 are within SEQ ID NO:521 and SEQ ID NO:522.

[1282] Contemplated is any sequence of SEQ ID NO:512 to SEQ ID NO:522 that has one or more of its residues covalently bound by a lipidic moiety e.g. a fatty acid (or derivative thereof), e.g, wherein a fatty acid is acylated to the N-terminus and/or wherein a fatty acid is acylated/conjugated to one or more lysine side-chains, optionally/preferably wherein the fatty acid comprises/contains between 2 to 100 {or 2 to 25} carbon atoms, optionally being a myristoyl/palmitoyl/stearoyl group. A bound fatty acid(s) advantageously increases the sequence's hyrophibicity.

[1283] SEQ ID NO:523 to SEQ ID NO:638 presents some non-limiting example embodiments of SEQ ID NO:12. Wherein some of the sequences within SEQ ID NO:523 to SEQ ID NO:550 are found in U.S. Pat. No. 9,132,198B2 and/or [218-219]. Some of the sequences within SEQ ID NO:551 to SEQ ID NO:629 are found in one or more of U.S. Pat. No. 10,626,147B2, U.S. Pat. No. 10,501,496B2, US 2019/0309020A1, US20170190743A1, US20170355730A1, US2019/0282654A1, US2019/0284240A1, WO2015/179691A2, [220-221] (wherein they are shown adept at conferring cellular entry of cyclic/bicyclic proteins). SEQ ID NO:630 contains SS-31 which is known to locate to mitochondria and has been used safely in clinical trials. Any of SEQ ID NO:551 to SEQ ID NO:629 with glutamine in it, in alternative (more preferred) sequence embodiments, this glutamine is absent. Not shown, but contemplated, and componentry to this disclosure, is the sequence of any of SEQ ID NO:523 to SEQ ID NO:630 in reverse (or only part(s) thereof is in reverse) and/or wherein the same amino acids are present but they are in a different order within the sequence and/or wherein the stereochemistry of at least one amino acid is inverted from how it is presented in the Sequence Listing (i.e. L to D form, or D to L form), optionally wherein the stereochemistry of all amino acids is inverted, optionally wherein only those amino acids with L stereochemistry are inverted (to D form), and/or wherein one or more hydrophobic residues are substituted with a different hydrophobic residue (preferably a more hydrophobic residue) independently selected at each position from the following options in this sentence; any sequence selected from SEQ ID NO:523 to SEQ ID NO:630 wherein one or more hydrophobic residues within it are substituted with a different hydrophobic residue (preferably a more hydrophobic residue) independently selected at each position from the following options: L-phenylalanine, D-phenylalanine, L-tryptophan, D-tryptophan, 3,3-diphenyl-L-alanine, 3,3-diphenyl-D-alanine, L-3-cyclohexylalanine, D-3-cyclohexylalanine, L-3-(1-naphthyl) alanine, D-3-(1-naphthyl) alanine, L-3-(2-naphthyl) alanine, D-3-(2-naphthyl) alanine, L-2-aminooctanoic acid, D-2-aminooctanoic acid, O-Methyl-L-tyrosine, O-Methyl-D-tyrosine, 2,6-dimethyl-L-tyrosine, 2,6-dimethyl-D-tyrosine, 2-Cyclohexyl-L-glycine, 2-Cyclohexyl-D-glycine. SEQ ID NO:631 to SEQ ID NO:638 are some of the novel CPP sequences by the teaching of this disclosure.

[1284] Innovatively, I have developed SEQ ID NO:512 (and encompassed sequences thereof) which teaches further novel CPP sequences of this disclosure. Wherein, by the teaching of the present disclosure, the precise sequence isn't as important as having multiple positively charged, preferably arginine, residues and one or more hydrophobic residues. A greater number of positive charges drives lower sequence log P, whilst a greater number of hydrophobic residues drives greater log P, wherein some preferred sequences have multiple positive charges (preferably due to multiple arginine residues) with reasonably high log P, which aren't too long. Wherein a useful metric (denoted u) for a CPP sequence is its number of positive charges (preferably due to arginine residues) plus its log P value, optionally (in some embodiments of μ) divided by its number of residues or/and wherein the number of possible residues in the sequence is capped at a selected number (optionally wherein this number is in the range 3-20 or 3-15, or 3-10, or 3-7), wherein a relatively high value of u is desirable in some embodiments: for example, equal to or (more preferred) higher than that for one or more of SEQ ID NO:523 to SEQ ID NO:630. For example, without the aforementioned division step, in some embodiments, a desirable value of μ is greater than 1, and an even more desirable value is greater than 2, and higher values of μ are even more desirable. With the aforementioned division step, in some embodiments, a desirable value of μ is greater than 0.6, and an even more desirable value is greater than 0.8, and higher values of μ, especially those over 1, are even more desirable. So, in some embodiments, one can rank a number of sequences from SEQ ID NO:512 (or one of SEQ ID NO:513 to SEQ ID NO:522) by which has the greatest μ value, and optionally select the sequence to use on this basis (or use this as one factor in the selection criteria). When two sequences of different lengths have the same or nearly equal μ value, the shorter sequence is favoured. By reducing all this complexity to such simple arithmetic (simply summing the log P values of each amino acid, and any positive charge[s] [preferably due to arginine residue(s)], in each amino acid sequence of specifically limited sequence length and/or wherein the sum is divided by the number of residues), one of the art can see that this is algorithmically tractable. One of the art can also envisage more complicated mathematical schemes knowing now the aims. For example, wherein the penalty cost of another residue is greater than 1 and/or there is an increasing penalty cost the longer the sequence (i.e. cost [denominator] doesn't increase linearly with length as in the scheme described, but super-linearly) and/or wherein a minimum number of positive charges present in the sequence is set (i.e. the number of positive charges needs to be equal to, or exceed, this number) and/or wherein the value contributed by a positive charge is greater than 1 [thence weighting the value of the positive charges more against that of the log P consideration, wherein in some embodiments this is implemented] and/or wherein a positive charge contributed by an arginine residue is given greater weight than that contributed by a lysine (e.g, wherein that ascribed to lysine is a fraction of that ascribed to arginine). In some embodiments, log D is used instead of log P in the calculations. In some embodiments, the positively charged residues are concentrated in the sequence i.e. close to one another e.g. adjacent, e.g. not many residues apart. In some embodiments, D-form of natural amino acids are used.

[1285] In some embodiments, a favoured CPP has at least 3 or more, or 5 or more, positive charges (preferably some or more, more preferably all, of which are arginine conferred), which lowers sequence log P, and requires some hydrophobic residues to increase log P, wherein residues with greater hydrophibicity are favoured because less of them are required to appreciably increase log P, and thence their use permits a higher value of μ (when its sequence length penalty is used). So, in these embodiments, the favouring of which hydrophobic amino acids to incorporate is according to which are most hydrophobic, with the most hydrophobic being most favoured typically (notwithstanding some parallel consideration of which are safe to administer to mammals, wherein those with a record of safe use in humans {e.g. as part of a drug candidate that has passed at least Phase I trials, or a licensed drug} are prioritized). The ordering of log P of some hydrophobic amino acids (not including those with halogen atoms, which are also contemplated but which tend to be slightly disfavoured): from highest to lowest (calculated by MarvinSketch software [Chemaxon, Budapest, Hungary] [5]): 2,4,6-trimethylphenylalanine, 3,3-diphenyl-alanine, 3-(1-naphthyl) alanine (used in BT1718 from Bicycle Therapeutics, presently in Phase I clinical trials), 3-(2-naphthyl) alanine, 2,6-dimethyl-tyrosine (used in clinical drug candidate SS-31 [called Elamipretide], which has passed Phase I safety trials), 2-aminooctanoic acid, cyclohexylalanine, cyclohexylglycine, tryptophan, phenylalanine, O-methyl-tyrosine, phenylglycine. So, 3-(1-naphthyl) alanine and 2,6-dimethyl-tyrosine are some especially prized hydrophobic residues to incorporate into sequences of SEQ ID NO:512 (or one of SEQ ID NO:513 to SEQ ID NO:522) because they have high log P and clinical precedent. Some CPP sequence embodiments, only contain arginine (preferably at least 3, or at least 5 residues thereof) and 3-(1-naphthyl) alanine and/or 2,6-dimethyl-tyrosine residues, wherein the L- or D-form is independently selected for each residue position.

[1286] In some embodiments, a CPP of this disclosure comprises (or consists of) one or more arginine residues alternate/alternating with one or more hydrophobic residues, optionally wherein the hydrophobic residues are independently selected at each position from the aforementioned list, optionally for 1 to 20 repeats, optionally wherein the repeat size can be variable within the sequence, optionally with a glutamine residue at one end (but preferably without this), optionally the CPP sequence is represented by the following formula, wherein Q is L- or D-glutamine (preferably absent), R is arginine (L- or D-arginine independently selected at each position) and @ is a hydrophobic residue, independently selected in each case, preferably at each selection it is one of the aforementioned hydrophobic residues (or a D- or L-stereoisomer thereof):
[1287] (Q)₀₋₁{(R)₀₋₁₀(Φ)₀₋₁₀}₁₋₂₀{(R)₀₋₁₀(Φ)₀₋₁₀}₀₋₂₀{(R)₀₋₁₀(Φ)₀₋₁₀}₀₋₂₀{(R)₀₋₁₀(Φ)₀₋₁₀}₀₋₂₀{(R)₀₋₁₀(Φ)₀₋₁₀}₀₋₂₀{(R)₀₋₁₀(Φ)₀₋₁₀}₀₋₂₀{(R)₀₋₁₀(Φ)₀₋₁₀}₀₋₂₀{(R)₀₋₁₀(Φ)₀₋₁₀}₀₋₂₀{(R)₀₋₁₀(Φ)₀₋₁₀}₀₋₂₀{(R)₀₋₁₀(Φ)₀₋₁₀}₀₋₂₀{(R)₀₋₁₀(Φ)₀₋₁₀}₀₋₂₀{(R)₀₋₁₀(Φ)₀₋₁₀}₀₋₂₀{(R)₀₋₁₀(Φ)₀₋₁₀}₀₋₂₀{(R)₀₋₁₀(Φ)₀₋₁₀}₀₋₂₀{(R)₀₋₁₀( )₀₋₁₀}₀₋₂₀{(R)₀₋₁₀(Φ)₀₋₁₀}₀₋₂₀{(R)₀₋₁₀(Φ)₀₋₁₀}₀₋₂₀{(R)₀₋₁₀(Φ)₀₋₁₀}₀₋₂₀{(R)₀₋₁₀(Φ)₀₋₁₀}₀₋₂₀{(R)₀₋₁₀(Φ)₀₋₁₀}₀₋₂₀(Q)₀₋₁

[1288] Preferably the above formula can be applied to select a sequence(s) from SEQ ID NO:512 (or at least one sequence within any of SEQ ID NO:513 to SEQ ID NO:522). In some CPP sequence embodiments, the number of positively charged (preferably arginine) residues and number of hydrophobic residues is equal, and in other embodiments, unequal, wherein the number of positively charged (preferably arginine) residues can be greater than the number of hydrophobic residues, or the inverse. In some embodiments, the number of hydrophobic residues is the number of positively charged (preferably arginine) residues plus 1 or 2 or 3 or 4, or minus 1 or 2 or 3 or 4. CPP comprising (or consisting of) a number of arginine residues selected from 3, 4, 5, 6, 7 (or more), and a number of hydrophobic residues selected from 2, 3, 4, 5, 6, 7, 8, 9, 10 (or more), optionally wherein the hydrophobic residues are independently selected at each hydrophobic position from L- or D-forms of 3,3-diphenyl-alanine, 3-(1-naphthyl) alanine, 3-(2-naphthyl) alanine, 2,6-dimethyl-tyrosine, 2-aminooctanoic acid, 3-cyclohexylalanine, or optionally only a sub-set thereof consisting of 3-(1-naphthyl) alanine and 2,6-dimethyl-tyrosine.

[1289] The use of at least one sequence from within SEQ ID NO:512 (or at least one sequence within any of SEQ ID NO:513 to SEQ ID NO:522, e.g. a sequence(s) selected from SEQ ID NO:631 to SEQ ID NO:638) as a Cell Penetrating Peptide (CPP) is componentry to this disclosure; for use to transport a cargo into a cell (by its conjugation to the cargo and administration to the cell); for use in a fusion protein to transport a cargo peptide/protein sequence into a cell; wherein any cargo, including any cargo peptide/protein sequence cargo, including any polynucleotide cargo, including any drug, including any FDA/EMA approved drug, including any anti-cancer/anti-viral drug (e.g. FDA/EMA approved), is contemplated. In some embodiments, transport into the mitochondrial matrix is contemplated.

[1290] Incidentally, the use of a non-peptide mitochondrial localizing moiety (non-limiting e.g. refer [222-224]) such as MitoQ (been used in clinical trials, or SKQ [or derivative thereof, refer work of Professor Vladimir P. Skulachev]) or its componentry triphenylphosphonium (TPP) moiety, or [225], is hereby contemplated, as is the use of any non-peptide cell penetrating moiety (e.g. SMOCs that can be easily attached to biomolecules {Okuyama et al (2007) Nature Methods Volume 4 p 153}, e.g. addition of guanidinium group(s) enhances cell penetration {Elson-Scwab et al (2007) J Biol Chem Volume 282 p 13585}).

### Cycle(s) Thereof

[1291] It will be appreciated that an amino acid sequence of/in this disclosure can be readily cyclated to form a cyclic/cyclated amino acid sequence of this disclosure. For non-liming example, cyclization of amino acid chains can be achieved by sidechain-to-sidechain, sidechain-to-backbone, or head-to-tail (C-terminus to N-terminus, which then confers the advantage that there is no C-terminus or N-terminus for exopeptidases to attack) cyclization techniques, which can, for non-limiting example, be synthesized using either classical solution-phase linear peptide cyclization or resin-based cyclization, or other method taught in U.S. Pat. No. 10,053,677B2 and/or U.S. Pat. No. 10,729,749B2 and references therein.

[1292] For a linear amino acid sequence of this disclosure/herein, corresponding cyclic forms, optionally wherein the cycle(s) is formed by use of a scaffold(s) (e.g. as in U.S. Pat. No. 10,624,968B2 and references therein), including multi-cyclic (e.g. bi-, tri-cyclic etc.) and/or cyclic forms with one or more of an “overhang/excess” sequence (which is not in a cycle) are componentry to this disclosure. Optionally, wherein a cycle is formed by the formation of a peptide bond between the N- and C-terminal residues of a linear amino acid sequence. Optionally, wherein a cycle(s) is created by judicious use of one or more cysteine residues naturally in the sequence, and/or one or more cysteine residues inserted/substituted into the sequence, optionally at an end(s), wherein a pair(s) of cysteine residues can bind, via their side-chains, by a disulphide bond. Optionally wherein at least two cysteine residues in the sequence are connected in parallel (in 3-D) by a CPP sequence (e.g. a poly-Arginine sequence, optionally containing one or more D-amino acids) with at least two cysteine residues in it, optionally at its N- and C-terminal ends. Bicyclic forms, with a CPP sequence in one cycle, and the cargo sequence (which can reduce/inhibit F₁F₀ ATP hydrolysis e.g. in a cell and/or a Sub-Mitochondrial Particle [SMP] assay of F₁F₀ ATP hydrolysis) in the other, are componentry to this disclosure, as is their use thereof (for at least one use disclosed herein), wherein it is well known in the art how to produce such bicyclic forms (with CPP in one cycle, and cargo sequence in other cycle) e.g. refer to U.S. Pat. No. 10,626,147B2, references therein, and patents or applications thereof that cite it.

### Scaffold Thereof

[1293] In some embodiments, a protein(s)/peptide(s) of/in this disclosure is combined with a molecular scaffold(s), some non-limiting examples of which are in U.S. Pat. No. 10,624,968B2, US2018/0280525A1, WO2016/067035A1, WO2017/191460A1 and references cited therein. In some embodiments, use thereof of a scaffold reduces susceptibility to one or more proteolytic enzyme species, which improves the plasma stability of the protein/peptide in the blood of a subject (that has a blood-based circulatory system). Preferably the scaffold is of known and low toxicity. Preferably the scaffold comprises reactive groups that are capable of reacting with functional group(s) of the protein(s)/peptide(s) to form covalent bonds. The scaffold may comprise one or more chemical group(s) which form the linkage with a protein(s)/peptide(s), such as (without limitation) amines, thiols, alcohols, ketones, aldehydes, nitriles, carboxylic acids, esters, alkenes, alkynes, azides, anhydrides, succinimides, maleimides, alkyl halides and acyl halides.

### Some Cyclic Peptide/Protein Embodiments of the Disclosure

[1294] Cyclic/bi-cyclic peptide/protein that comprises (or consists of) at least one (any) IF1 protein/fragment (or sequence variant thereof); (any) IF1 protein/fragment (or sequence variant thereof) within a cyclic/bi-cyclic peptide/protein;
[1295] Cyclic, instead of linear, form of SEQ ID NO:X, including
[1296] cyclic/bicyclic form comprising (or consisting of):
[1297] (SEQ ID NO:X)_{y}-Cys- (SEQ ID NO:X)ₘ-Cys- (SEQ ID NO:X)ᵥ; or
[1298] (SEQ ID NO:X)_{y}-Cys- (SEQ ID NO:X)ₙ-Cys- (SEQ ID NO:X)ₘ-Cys- (SEQ ID NO:X)ᵥ;
[1299] which, when y and v equal 0, is:
[1300] Cys- (SEQ ID NO:X)ₘ-Cys; or
[1301] Cys- (SEQ ID NO:X)ₙ-Cys- (SEQ ID NO:X)ₘ-Cys;
[1302] wherein y, n, m, v, are independently selected from an integer within the range 0-4, Cys is cysteine [or variant thereof] (preferably with its side-chain bound to a scaffold structure by a thioether or disulphide bond, wherein a number of scaffold options to combine to, and how to combine to each, is taught by one or more of [226-231], U.S. Pat. No. 10,624,968B2, US2018/0280525A1, WO2016/067035A1, WO2017/191460A1 and/or other paper/patent/patent application output of Bicycle Therapeutics [which has corporate entities in the UK [Ltd.] and USA [Inc.]], [232-234], U.S. Pat. No. 7,538,085B2, U.S. Pat. No. 10,626,147B2, U.S. Pat. No. 10,736,932B2, US20190284239A1, US2020/0291070A1, WO2019/148194A2, WO2019/148195A2, and/or other paper/patent/patent application output of Entrada Therapeutics Inc. and/or its founder Dehua Pei), X is independently selected for each occurrence of X from 1, or the number of sequences in the Sequence Listing component of this present application, or any integer between 1 and the total number of sequences in the Sequence Listing component of this present application, wherein SEQ ID NO:X in this context (and optionally other contexts herein also) can also refer to fragment of SEQ ID NO:X, or concatenated fragments of SEQ ID NO:X, and/or sequence variant of SEQ ID NO:X;
[1303] SEQ ID NO:X in each case thereof can be integrated into the sequence in either orientation (preferably N to C-terminal orientation);
[1304] in some embodiments of a bicycle structure, SEQ ID NO:X in one cycle is a Cell Penetrating Peptide (CPP) sequence, optionally selected from SEQ ID NO:124 to SEQ ID NO:126 or SEQ ID NO:440 to SEQ ID NO:638 (wherein some of SEQ ID NO:551 to SEQ ID NO:629 are shown suited to confer cellular entry of cyclic/bi-cyclic peptides in [220, 221, 232], U.S. Pat. No. 10,626,147B2, U.S. Pat. No. 10,501,496B2, US2019/0309020A1, US2017/0355730A1, US2017/0190743A1, US2019/0282654A1, US2019/0284240A1, WO2015/179691A2) and SEQ ID NO:X in the other cycle comprises (or consists of) at least one “immature” (with Mitochondrial Import Sequence, MIS) or “mature” (without MIS) IF1 protein/fragment (or sequence variant) thereof, or an MIS sequence concatenated to an IF1 protein fragment (or sequence variant thereof), optionally at least one sequence selected from SEQ ID NO:5 to SEQ ID NO:123, or a fragment (or concatenation of fragments) thereof, optionally-without its epitope/affinity tag and CPP components—at least one of SEQ ID NO:166 to SEQ ID NO:335 or SEQ ID NO:338 to SEQ ID NO:438;
[1305] in some embodiments, the sequence is bound to a scaffold as below, wherein each S atom, in each side-chain of shown Cys residues, is bound to a carbon of the scaffold by a thioether bond:

[chemical structure]

[1306] in some alternative embodiments, the sequence is bound to a scaffold as below, wherein in the structure on the left, (unlike above) the S atom in the Cys side-chain is not explicitly shown, and unlike above, the S atom in the Cys side chain binds the scaffold (an S atom of the scaffold) by a disulphide (S—S) bond (disulphide bonds denoted by dashed lines), wherein the second Cys isn't shown because a variant is in its place, which has CONH₂ instead of COOH (i.e. the C-terminal end is amidated, which simultaneously takes away a negative charge and makes this C-terminal end less susceptible to exopeptidases; cases where this end is COOH instead are also contemplated); note that disulphide bonds break within the reducing intracellular environment: it is preferred to have a CPP sequence in the left hand loop (left as one looks at the page) and in the right hand loop a “mature” IF1 protein/fragment (or sequence variant thereof), preferably with a Mitochondrial Import Sequence [MIS] N-terminal to it:

[chemical structure]

[1307] wherein SEQ: X=SEQ ID NO:X, z1, z2, z3 are independently selected from an integer between 0-100, wherein a sub-range of 1-50 is preferred in some embodiments, 1-10 in others, 1-5 in others, 0-7 in others;
[1308] X independently selected at each point of use, z1, z2, z3, y, n, m, v: all possible value (within their designated ranges) combinations thereof are contemplated across different embodiments;
[1309] note that in some embodiments (here and in other contexts herein), what SEQ ID NO:X can refer to isn't restricted to the sequences in the Sequence Listing component to this disclosure and can instead refer to any sequence of/in, e.g. taught by, this disclosure;
[1310] in some embodiments, at least one cycle of the bicyclic/cyclic structure comprises (or consists of) an IF1 protein fragment that contains the H49 (“mature” [without MIS] IF1 protein numbering) residue and up to 3 or 4 or 5 or 6 or 7 or 8 or 9 or 10 or 11 or 12 or 13 or 14 or 15 surrounding residues, or an IF1 protein fragment from a part of the IF1 protein that is more C-terminal than H49, optionally with a conjoined MIS sequence N-terminal to it.

[1311] A polypeptide comprising at least three cysteine (or variant thereof) residues, separated by at least two loop sequences, and a molecular scaffold which forms covalent bonds with the cysteine residues of the polypeptide such that at least two polypeptide loops are formed on the molecular scaffold, which can inhibit/reduce F₁F₀ ATP hydrolysis (e.g. in a cell and/or in a Sub-Mitochondrial Particle [SMP] assay of F₁F₀ ATP hydrolysis), and/or a pharmaceutically-acceptable salt, solvate, hydrate, prodrug, liposome, nanoparticle (e.g. lipid nanoparticle, LNP) or other vector of the art thereof.

Some Further Sequences of this Disclosure

[1312] All IF1 proteins (from all species, especially from eukaryotes, particularly from mammals), and sequence variant(s) thereof, and all IF1 protein fragments, and sequence variant(s) thereof, and concatenation(s) thereof, and any fusion protein incorporating at least one of the aforementioned, are componentry to this disclosure, as are the nucleotide sequences that code for them, as is the use of at least one of the aforementioned, for at least one use disclosed herein. Any IF1 protein/fragment (or sequence variant thereof), from any species, and use thereof (for at least one use disclosed herein). Any polynucleotide, gene (if applicable), DNA, cDNA, RNA, mRNA sequence that codes (via the genetic code [wherein its redundant character is well known] or a known variant thereof [e.g. mitochondrial]) for any IF1 protein/fragment (or sequence variant thereof), and use thereof (for at least one use disclosed herein), wherein the opposite, complimentary base-pairing strand to the coding sequence is also contemplated and any nucleotide sequence that can hybridize to it “under stringent conditions” (term well understood in the art, illustrative definition included herein), as is the peptide/protein sequence that it encodes, and its use thereof (for at least one use disclosed herein). Given that many species have one or more of an IF1 protein sequence, and there are many species, there are many IF1 protein embodiments of the present disclosure. Although IF1 protein sequences can vary between species, they are typically functionally interchangeable between different species [141], wherein even a yeast IF1 protein sequence can inhibit bovine F₁F₀ ATP hydrolysis [234]. One of the art will know how to find further IF1 protein sequences of other/same species, not shown here for brevity, but which are also componentry to this disclosure (as are their fragments, and concatenated fragments thereof), as are their sequence variants, for example, those with their “phosphorylation control switch” residue, and/or one or more of their “pH dependence motif” residues, changed to another amino acid (these element terms are explained by FIG. 10 and its legend). For example, to find further IF1 protein sequences of other/same species, one of the art can refer to InterPro family “Mitochondrial ATPase inhibitor (IPR007648)” and/or Pfam family “IATP (PF04568)”. All protein sequences in the IPR007648 and/or PF04568 protein families (and sequence variants thereof), and their sub-sequences/fragments (and sequence variants thereof), and their concatenated fragments (and sequence variants thereof), are componentry to this disclosure, and may be woven into any of the fusion proteins herein, substituting for any element therein. Or, for example, one of the art can use an IF1 protein sequence, optionally the human IF1 protein sequence (UniProtKB: Q9UII2, SV=1), as the query string in a “Basic Local Alignment Search Tool” (BLAST, https://blast.ncbi.nlm.nih.gov) search of a protein database (protein BLAST, BLASTp), optionally the “non-redundant protein sequences” (nr) database at the National Center for Biotechnology Information (NCBI) which is one of the database options offered with NCBI BLAST, and/or use BLAST at UniProt and search the UniProt protein database https://www.uniprot.org/blast), and from the results outputted select a protein sequence(s) of high BLAST score/percentage sequence identity/similarity (in different non-limiting embodiments: >99%, >98%, >95%, >90%, >80%, >70%, >60%, >50%, >40%, >30% sequence similarity) to the query protein (wherein BLAST results are typically/optionally returned to the user in order of BLAST score from high to low) and/or that have one or more IF1 protein motif characteristics, such as the “pH dependence motif”. Especially preferred are those proteins that have been annotated in the database as an IF1 protein and/or as a protein product of an ATP5IF1 (alternatively known as ATPIF1) gene, wherein the human ATP5IF1 gene has HUGO Gene Nomenclature Committee (HGNC) ID of HGNC: 871, and IF1 protein products of orthologs of this gene are componentry to the present disclosure. One of the art knows, and/or knows how to find, multiple online methods to find orthologs e.g. using OrthoDB (www.orthodb.org, to illustrate, refer to Group 1566610at2759 and/or Group 212481at40674 therein). All protein products of an ATP5IF1 gene are componentry to the present disclosure. For example, the human ATP5IF1 gene has three protein products: primary accession numbers in UniProtKB: Q9UII2, Q9UII2-2 and Q9UII2-3, which are all componentry to this disclosure. When a single species has multiple IF1 proteins/homologs, e.g. Heterocephalus glaber has G5AP86 and A0A0P6J910 (UniProtkb primary accession numbers), e.g. Mus musculus has 035143, E9PV44 and Q8BTA7, e.g. Oryctolagus cuniculus has G1SEZ3, G1TES2 and G1U0F8, they are all contemplated by, and componentry to, this disclosure.

[1313] FIG. 10 presents some exemplifications of SEQ ID NO:38, and some other peptide/protein inhibitors of F₁F₀ ATP hydrolysis, which are in turn SEQ ID NO:639 to SEQ ID NO:1425.

[1314] Protein sequences in InterPro “IPR007648” are incorporated herein in their entirety by reference, incorporated herein in SEQ ID NO:[B+Z], where B is the number of sequences in the Sequence Listing of this application and Z is any integer in the numerical range 1 to the number of protein sequences (optionally/preferably only including the latest sequence version for each entry/UniProtKB primary accession number) in InterPro “IPR007648”.

[1315] Peptide/protein comprising (or consisting of) at least one of SEQ ID NO:X, and/or at least one fragment of at least one of SEQ ID NO:X, and/or concatenated fragments of at least one of SEQ ID NO:X, and/or at least one functional sequence variant thereof, and its use thereof (for at least one use disclosed herein); componentry to the present disclosure, and its use thereof (for at least one use disclosed herein), is SEQ ID NO:X [wherein X can be 1, or the number of sequences in the Sequence Listing component to this application, or any integer between 1 and the total number of sequences in the Sequence Listing component to this application {or a higher number to include any sequences incorporated by reference}] and any fragment/sub-sequence thereof, and any concatenated fragments thereof, and any “conservatively modified variant” thereof (including any “conservatively modified variant” of fragment/concatenation of fragments thereof), and any functional sequence variant thereof (including any functional sequence variant of fragment/concatenation of fragments thereof), wherein “functional” in this context is an ability to inhibit/reduce F₁F₀ ATP hydrolysis, for example inside a cell or in a Sub-Mitochondrial Particle (SMP) assay of F₁F₀ ATP hydrolysis;
[1316] of a peptide/protein sequence of/in this disclosure, any functional sequence variant thereof, any functional fragment thereof (including any functional sequence variant thereof), any functional concatenation of fragments thereof (including any functional sequence variant thereof), is a sequence of this disclosure (and its use is contemplated, for at least one use disclosed herein);
[1317] At any point that SEQ ID NO:X is referred to herein, wherein X can be at least 1, or at least the number of sequences in the Sequence Listing component to this application, or at least any integer between 1 and the total number of sequences in the Sequence Listing component to this application, then in alternative embodiments SEQ ID NO:X, independently at each point of use, refers to a functional sequence variant of SEQ ID NO:X (or a functional sequence variant of a fragment, or a concatenation of fragments, thereof), wherein “functional” is as earlier defined.

[1318] Componentry to this disclosure is:
[1319] a nucleotide(s) and/or amino acid sequence(s) of/in this disclosure produced/isolated/purified/substantially purified/partially purified;
[1320] a produced/isolated/purified/substantially purified/partially purified polynucleotide comprising (or consisting of) at least one nucleotide sequence of/in this disclosure (or a fragment thereof, or concatenated fragments thereof);
[1321] a produced/isolated/purified/substantially purified/partially purified peptide/protein comprising (or consisting of) at least one amino acid sequence of/in this disclosure (or a fragment thereof, or concatenated fragments thereof);
[1322] a cell-free and serum-free composition (preferably lacking any other human protein) comprising (or consisting of) a peptide/protein comprising (or consisting of) an amino acid sequence of/in this disclosure;
[1323] a polynucleotide comprising (or consisting of) at least one nucleotide sequence of/in this disclosure (or a fragment thereof, or concatenated fragments thereof); a peptide/protein comprising (or consisting of) at least one amino acid sequence of/in this disclosure (or a fragment thereof, or concatenated fragments thereof);
[1324] In some embodiments, a peptide/protein of this disclosure is at least 95% pure, and/or at least 99% pure, and/or substantially free from impurity/impurities.

[1325] Any sub-sequence/fragment of an amino acid/nucleotide sequence of/in this disclosure, and/or use thereof (for at least one use disclosed herein), is componentry to this disclosure. Any concatenation of sub-sequences/fragments of at least one amino acid/nucleotide sequence of/in this disclosure, and/or use thereof (for at least one use disclosed herein), is componentry to this disclosure.

[1326] A (optionally produced/isolated/purified/substantially purified/partially purified) polynucleotide encoding at least one amino acid sequence of/in this disclosure. DNA comprising (or consisting of) an intronless sequence encoding at least one amino acid sequence of/in this disclosure. cDNA encoding at least one amino acid sequence of/in this disclosure. DNA/cDNA encoding at least one amino acid sequence of/in this disclosure or a degenerate variant thereof. DNA comprising (or consisting of) (a) cDNA encoding at least one amino acid sequence of/in this disclosure, or (b) a degenerate variant of the cDNA.

[1327] Every nucleotide sequence (gene [if applicable, preferably isolated/produced], DNA, RNA, mRNA, cDNA) that codes, by the genetic code, for a peptide/protein/amino acid sequence of/in this disclosure is also componentry to this disclosure (as is each opposite complimentary base pairing strand to the coding sequence, optionally wherein the coding and anti-coding strands exist as a double-stranded polynucleotide), as is its use thereof (for at least one use disclosed herein). Componentry to this disclosure is to optimize the codons used, dependent upon which species, and/or intracellular compartment (e.g. mitochondria or nucleus), the nucleotide sequence will (primarily) be expressed in. Wherein this optimization is to use the most commonly employed codon for each amino acid, in the applicable type of intracellular compartment, in the applicable species, wherein there is publically available data on codon usage in different species (illustrative, non-limiting e.g. refer to https://www.genscript.com/tools/codon-frequency-table, http://www.kazusa.or.jp/codon/, https://www.bioinformatics.org/sms2/rev_trans.html). Nucleotide sequences of/in this disclosure can be single- or double-stranded (or contain both single- and double-stranded portions, and/or contain triple-stranded portions). All these forms are contemplated and componentry to the disclosure, as is their use thereof (for at least one use disclosed herein).

[1328] In relation to an amino acid or nucleotide sequence of/in this disclosure, “conservatively modified variants thereof” (USPTO terminology) are also componentry to this disclosure, as is their use thereof (for at least one use disclosed herein). In relation to an amino acid sequence of/in this disclosure, I report that sequence variants exist, and a “VARIANT” thereof (WIPO ST.25 terminology) is also componentry to this disclosure, as is its use thereof (for at least one use disclosed herein).

[1329] A sequence variant(s) of an amino acid sequence of/in this disclosure, which can also inhibit/reduce F₁F₀ ATP hydrolysis (for example inside a cell, preferably a eukaryote cell, or in an SMP assay of F₁F₀ ATP hydrolysis), is also componentry to this disclosure, as is its use thereof (for at least one use disclosed herein), as are the nucleotide sequences (gene [if applicable, preferably isolated/produced], DNA, RNA, mRNA, cDNA) that code for it, as is the use of one or more these thereof (for at least one use disclosed herein).

[1330] Componentry to this disclosure is:
[1331] a peptide/protein that has, or (in other embodiments) which has a region that has, at least 30% (or, in alternative embodiments [wherein each different following term [>% value] is a different embodiment]: >35%, or >40%, or >45%, or >50%, or >55%, or >60%, or >65%, or >70%, or >75%, or >80%, or >85%, or >90%, or >95%, or >96%, or >97%, or >98%, or >99%, or >99.5%) sequence identity to an IF1 protein or a fragment thereof, or concatenated fragments thereof, which can inhibit/reduce F₁F₀ ATP hydrolysis (for example inside a cell, preferably a eukaryote cell, or in a Sub-Mitochondrial Particle [SMP] assay of F₁F₀ ATP hydrolysis), and its use thereof (for at least one use disclosed herein); DNA with at least 30% (or, in alternative embodiments [wherein each different following term [>% value] is a different embodiment]: >35%, or >40%, or >45%, or >50%, or >55%, or >60%, or >65%, or >70%, or >75%, or >80%, or >85%, or >90%, or >95%, or >96%, or >97%, or >98%, or >99%, or >99.5%) sequence identity to the cDNA of an IF1 protein or a fragment thereof, or concatenated fragments thereof, wherein its coded amino acid sequence can inhibit/reduce F₁F₀ ATP hydrolysis (for example inside a cell, preferably a eukaryote cell, or in an SMP assay of F₁F₀ ATP hydrolysis), and the use of this DNA and/or its coded for peptide/protein (for at least one use disclosed herein) is hereby contemplated;
[1332] RNA (e.g. mRNA) with at least 30% (or, in alternative embodiments [wherein each different following term [>% value] is a different embodiment]: >35%, or >40%, or >45%, or >50%, or >55%, or >60%, or >65%, or >70%, or >75%, or >80%, or >85%, or >90%, or >95%, or >96%, or >97%, or >98%, or >99%, or >99.5%) sequence identity to the mRNA of an IF1 protein or a fragment thereof, or concatenated fragments thereof, wherein its coded amino acid sequence can inhibit/reduce F₁F₀ ATP hydrolysis (for example inside a cell, preferably a eukaryote cell, or in an SMP assay of F₁F₀ ATP hydrolysis), and the use of this RNA and/or its coded for peptide/protein (for at least one use disclosed herein) is hereby contemplated.

[1333] Any peptide/protein/amino acid sequence that has notable sequence similarity/identity/homology (at least >30%, and in different embodiments: >40%, >50%, >60%, >65%, >70%, >75%, >80%, >85%, >90%, >95%, >98%, >99%, >99.5%, >99.8% sequence similarity/identity/homology) to a peptide/protein/amino acid sequence (and/or to a fragment thereof, and/or concatenated fragments thereof) of/in this disclosure is also componentry to this disclosure, as is its use thereof (for at least one use disclosed herein), as are the nucleotide sequences (gene [if applicable, preferably isolated/produced], DNA, RNA, mRNA, cDNA) that code for it, as is the use of one or more these thereof (for at least one use disclosed herein). Any peptide/protein/amino acid sequence that has notable sequence similarity/identity/homology (at least >30%, and in different embodiments: >40%, >50%, >60%, >70%, >80%, >90%, >95%, >98%, >99%, >99.5%, >99.8% sequence similarity/identity/homology) to a peptide/protein/amino acid sequence (and/or to a fragment thereof, and/or concatenated fragments thereof) of/in this disclosure, which can also inhibit/reduce F₁F₀ ATP hydrolysis (for example inside a cell, preferably a eukaryote cell, or in a Sub-Mitochondrial Particle [SMP] assay of F₁F₀ ATP hydrolysis), is also componentry to this disclosure, as is its use thereof (for at least one use disclosed herein), as are the nucleotide sequences (gene [if applicable, preferably isolated/produced], DNA, RNA, mRNA, cDNA) that code for it, as is the use of one or more these thereof (for at least one use disclosed herein).

[1334] Any nucleotide sequence that has notable sequence similarity/identity/homology (at least >30%, and in different embodiments: >40%, >50%, >60%, >65%, >70%, >75%, >80%, >85%, >90%, >95%, >98%, >99%, >99.5%, >99.8% sequence similarity/identity/homology) to a nucleotide sequence (and/or to a fragment thereof, and/or concatenated fragments thereof) of/in this disclosure is also componentry to this disclosure, as is its use thereof (for at least one use disclosed herein), as is the amino acid sequence (peptide/protein) that it codes for, as is its use thereof (for at least one use disclosed herein). Any nucleotide sequence that has notable sequence similarity/identity/homology (at least >30%, and in different embodiments: >40%, >50%, >60%, >65%, >70%, >75%, >80%, >85%, >90%, >95%, >98%, >99%, >99.5%, >99.8% sequence similarity/identity/homology) to a nucleotide sequence (and/or to a fragment thereof, and/or concatenated fragments thereof) of/in this disclosure is also componentry to this disclosure, as is its use thereof (for at least one use disclosed herein), wherein it too encodes an amino acid sequence (peptide/protein) that can inhibit/reduce F₁F₀ ATP hydrolysis (for example inside a cell, preferably a eukaryote cell, or in a Sub-Mitochondrial Particle [SMP] assay of F₁F₀ ATP hydrolysis), wherein the use (for at least one use disclosed herein) of this amino acid sequence (peptide/protein) is also componentry to this disclosure.

[1335] Conservatively modified peptide/protein sequence variants of a sequence of/in this disclosure are themselves sequences of this disclosure, especially those that retain biological activity, wherein they can still inhibit/reduce F₁F₀ ATP hydrolysis (e.g. in a cell and/or in a Sub-Mitochondrial Particle [SMP] assay of F₁F₀ ATP hydrolysis), and their use (for at least one use disclosed herein) is herein contemplated. One of the art knows, optionally guided by software (e.g. DNASTAR Software, optionally DNASTAR Lasergene package [DNASTAR, Masidon Wisconsin, USA]), amino acid substitution(s) that highly conserve one or more structural/chemical properties such as one or more of polarity, charge, solubility, hydrophobicity, hydrophilicity, amphipathic character and so can select amino acid sequence substitution(s), optionally with one or more amino acid insertions/deletions, that retain biological activity, which can still inhibit/reduce F₁F₀ ATP hydrolysis. Conservative amino acid substitutions may include synonymous amino acid residues within a group which have sufficiently similar physicochemical properties, so that a substitution between members of the group will preserve the biological activity of the molecule (see e.g. Grantham, R. (1974), Science 185, 862-864). Preferably, synonymous amino acid residues, which are classified into the same groups and are typically exchangeable by conservative amino acid substitutions, are defined in Table 2 of U.S. Pat. No. 8,080,517B2 (herein incorporated by reference). Other groupings of amino acids by physicochemical properties (and/or similar side-chains) are known to those of the art and incorporated herein e.g. refer [P14], U.S. Pat. No. 9,255,124B2, and can include non-proteinogenic amino acids e.g. refer U.S. Pat. No. 10,626,147B2. For example, a group of amino acids having aliphatic side chains is glycine, alanine, valine, leucine, and isoleucine; a group of amino acids having aliphatic-hydroxyl side chains is serine and threonine; a group of amino acids having amide-containing side chains is asparagine and glutamine; a group of amino acids having aromatic side chains is phenylalanine, tyrosine and tryptophan; a group of amino acids having basic/positive side chains is lysine, arginine and histidine, a group of amino acids having negative side chains is aspartic acid and glutamic acid, small non-polar, hydrophobic amino acids include glycine, alanine, leucine, isoleucine, valine, proline, and methionine, large non-polar, hydrophobic amino acids include phenylalanine, tryptophan and tyrosine, polar neutral amino acids include serine, threonine, cysteine, asparagine and glutamine, and a group of amino acids having sulfur-containing side chain is cysteine and methionine. Some (non-limiting) preferred conservative amino acid substitution groups are: valine-leucine-isoleucine; phenylalanine-tyrosine; lysine-arginine; alanine-valine; glutamic-aspartic; and asparagine-glutamine. Some tools of the art to identify conservative substitutions include Grantham's distance, Sneath's index, Epstein's coefficient of difference, Miyata's distance, Experimental Exchangeability (e.g. see [235], or a similar study).

[1336] To determine the percent identity of two amino acid sequences, or of two nucleotide sequences, the sequences are aligned by one of the art, and/or an algorithm of the art, for optimal comparison purposes (e.g. in some embodiments, gap(s) can be introduced in the first sequence, and/or in the second sequence, for optimal alignment of the first with the second sequence). After this alignment, the amino acid/nucleotide residues at corresponding amino acid/nucleotide positions are then compared. When a position in the first sequence is occupied by the same amino acid residue or nucleotide as the corresponding position in the second sequence, then the molecules are identical at that position. The percent identity between the two sequences is a function of the number of identical positions shared by the sequences {i.e. % identity=(number of identical overlapping positions/total number of positions)*100}. Optionally, the determination of percent identity between two sequences is accomplished using a mathematical algorithm. A preferred, non-limiting example of a mathematical algorithm utilized for the comparison of two sequences is the algorithm of Karlin and Altschul, 1990, Proc. Natl. Acad. Sci. U.S.A. 87:2264-2268, modified as in Karlin and Altschul, 1993, Proc. Natl. Acad. Sci. U.S.A. 90:5873-5877. Such an algorithm is incorporated into the NBLAST and XBLAST programs of Altschul et al., 1990, J. Mol. Biol. 215:403. BLAST nucleotide searches can be performed with the NBLAST nucleotide program parameters set (e.g. for score=100, wordlength=12) to obtain nucleotide sequences similar/homologous to a nucleotide sequence of the present disclosure. BLAST protein searches can be performed with the XBLAST program parameters set (e.g. to Score=50, wordlength=3) to obtain amino acid sequences similar/homologous to a protein sequence of the present disclosure. To obtain gapped alignments for comparison purposes, Gapped BLAST can be utilized as described in Altschul et al., 1997, Nucleic Acids Res. 25:3389-3402. Alternatively, PSI-BLAST can be used to perform an iterated search which detects distant relationships between molecules. When utilizing BLAST, Gapped BLAST and/or PSI-Blast programs, the default parameters of the respective programs (e.g., of XBLAST and NBLAST) can be used (see e.g. the NCBI website, ncbi.nlm.nih.gov, where the BLAST family of programs can be found). Another preferred, non-limiting example of a mathematical algorithm utilized for the comparison of sequences is the algorithm of Myers and Miller, 1988, CABIOS 4:11-17. Such an algorithm is incorporated in the ALIGN program (version 2.0) which is part of the GCG sequence alignment software package. When utilizing the ALIGN program for comparing amino acid sequences, a PAM 120 weight residue table, a gap length penalty of 12, and a gap penalty of 4 can be used. Alternative methods in the art (and/or programs) of calculating percent identity are also hereby contemplated. For example, the percent identity between two sequences can be determined using a technique(s)/algorithm(s) similar to one listed herein, with or without allowing gaps. Comparing the similarity/identity of sequences across the entirety of their length, or only part(s) thereof, are both contemplated (full/global or partial/local alignment). Another program of the art is FASTA (Pearson (1990), Methods Enzymol. 183, 63-98: Pearson and Lipman (1988), Proc. Natl. Acad. Sci. U.S.A 85, 2444-2448.) and others are the programs available in the Wisconsin Sequence Analysis Package, version 9.1 (Devereux et al., 1984, Nucleic Acids Res. 12, 387-395.), for example the programs BEST FIT and GAP may be used to determine the % identity between two polynucleotides and the % identity and the % homology between two polypeptide sequences. BESTFIT uses the “local homology’ algorithm of (Smith and Waterman (1981), J. Mol. Biol. 147, 195-197) and finds the best single region of similarity between two sequences.

[1337] A nucleotide sequence that can hybridize “under stringent conditions” with a nucleotide sequence of/in this disclosure is also componentry to this disclosure, as is its complementary (by base pairing rules) nucleotide sequence, and its use thereof (for at least one use disclosed herein), as well as the amino acid sequence(s) (peptide[s]/protein[s]) that it codes for, and its use thereof (for at least one use disclosed herein). A nucleotide sequence that can hybridize “under stringent conditions” with the complimentary base-pairing strand of a nucleotide sequence of/in this disclosure is also componentry to this disclosure, as is its use thereof (for at least one use disclosed herein), as well as the amino acid sequence(s) (peptide[s]/protein[s]) that it codes for, and its use thereof (for at least one use disclosed herein). A nucleotide sequence that can hybridize “under stringent conditions” with the complimentary base-pairing strand of a nucleotide sequence of/in this disclosure is also componentry to this disclosure, as is its use thereof (for at least one use disclosed herein), wherein it too encodes an amino acid sequence (peptide/protein) that can inhibit/reduce F₁F₀ ATP hydrolysis (for example inside a cell, preferably a eukaryote cell, or in a Sub-Mitochondrial Particle [SMP] assay of F₁F₀ ATP hydrolysis), wherein the use (for at least one use disclosed herein) of this amino acid sequence (peptide/protein) is also componentry to this disclosure. Herein “hybridizes under stringent conditions” describes conditions for hybridization and washing under which nucleotide sequences with notable complementary sequence identity, at least 30%, typically remain hybridized to each other. Such stringent conditions are known to those skilled in the art and some can, for example, be found in Current Protocols in Molecular Biology, John Wiley & Sons, NY. In a non-limiting example, stringent hybridization conditions are hybridization at 6*Sodium chloride/sodium citrate (SSC) at about 45° C., followed by one or more washes in 0.1*SSC, 0.2% SDS at about 68° C. In a more preferred non-limiting example, stringent hybridization conditions are hybridization in 6×SSC at about 45° C., followed by one or more washes in 0.2*SSC, 0.1% SDS at 50-65° C. (i.e. one or more washes at 50° C., 55° C., 60° C. or 65° C.). In other embodiments, the term “under stringent conditions” is redefined to refer to more stringent conditions (e.g. by using higher temperature) wherein only nucleotide sequences, in different embodiments, at least 40%, or at least 50%, or at least 60%, or at least 70%, or at least 75%, or at least 80%, or at least 85%, or at least 90%, or at least 95%, or at least 98%, or at least 99%, or at least 99.5%, complementary to each other typically remain hybridized to each other. In other different embodiments of this disclosure, the term “under stringent conditions” herein is redefined to refer to “stringent conditions” or “high stringency conditions” or “moderate stringency conditions” or “low stringency conditions” in U.S. Pat. No. 8,080,517B2 (herein incorporated in its entirety by reference).

[1338] Unless otherwise indicated, amino acid sequences herein are presented in the order from the “N” (or amino) terminus to the “C” (or carboxyl) terminus. Herein homo-polymer sequences can be represented by a one-letter amino acid symbol followed by the number of consecutive occurrences of that amino acid in the sequence (e.g. R7 represents a heptamer that consists of L-arginine residues). Generally in the art, the terms peptide, polypeptide, protein are amino acid sequences of different lengths, but wherein the cut-offs can be somewhat ambiguous even to those of the art, and so, to simplify, these terms are used completely interchangeably herein, to refer to any amino acid sequence, of any length. Although, herein, “peptide” does tend to be used for shorter, and “protein” for longer, amino acid sequences. Peptidomimetics of peptides of/in this disclosure are also componentry to this disclosure. Methods for preparing peptidomimetic compounds are well known in the art e.g. refer “Quantitative Drug Design”, CA Ramsden Gd., Chapter 17.2, F. Choplin Pergamon Press (1992).

[1339] For amino acid/nucleotide sequences of/in this disclosure, their “sequence variants”, “variants”, “mutants”, “derivatives”, “analogues”/“analogs” and “fragments” (and sequence variants, variants, mutants, derivatives, analogues/analogs thereof) thereof are also componentry to this disclosure (as is their use, for at least one use disclosed herein), wherein the width/parameters of the meaning of these terms is clear to one of the art, e.g. from the patent literature in this area (therapeutic proteins/peptides), wherein those preferred retain the ability to cause a reduction in F₁F₀ ATP hydrolysis (e.g. in a cell and/or a Sub-Mitochondrial Particle [SMP] assay of F₁F₀ ATP hydrolysis). Herein, when a sequence of/in this disclosure is referred to, simultaneously, in alternative embodiments: sequence variants, variants, mutants, derivatives, analogues/analogs and fragments (and sequence variants, variants, mutants, derivatives, analogues/analogs thereof) thereof, which retain the desired activity, are also referred to. Also contemplated is an amino acid/nucleotide sequence(s) of/in this disclosure as part of, within, a longer sequence (and its use thereof, for at least one use disclosed herein) e.g. a fusion protein thereof. Also contemplated are hybrids of one or more different sequences of/in this disclosure. Also contemplated is the combined use (for at least one use disclosed herein) of one or more sequences of/in this disclosure, whereby an additive/synergistic effect(s) is contemplated.

[1340] For an amino acid sequence of/in this disclosure, all possible stereoisomeric forms of it (contemplating all chiral centres, including any in side-chains) are componentry to this disclosure e.g. L-amino acid or D-amino acid (or mixture thereof) are independently selected at each residue position, wherein isomeric, racemic, scalemate forms etc. are contemplated.

[1341] For a sequence of L-amino acids, its retroinverse/retro-inverse sequence is this sequence in reverse, wherein all the amino acids are D-amino acids. So, it is a sequence reversed with chirality inverted. In some cases, the amino acid side-chains of a sequence, and its retroinverse sequence, are equivalently arranged in relation to one another, wherein the retroinverse sequence is less susceptible to proteolysis by proteases. See e.g. Jameson et al., Nature, 368, 744-746(1994); Brady et al., Nature, 368, 692-693 (1994); Guichard et al, J. Med. Chem. 39, 2030-2039(1996), U.S. Pat. No. 8,080,517B2, US2018/0015137A1, U.S. Pat. No. 6,730,293B1. Retroinverse sequences of sequences of/in this disclosure are also sequences of this disclosure, as is their use (e.g. for at least one use disclosed herein). Mixed sequences, wherein only part of a sequence is its retroinverse, are also contemplated, as is their use (e.g. for at least one use disclosed herein). Retroinverse (part or entirety) sequences, wherein one or more of the amino acid residues with a chiral centre in their side-chain (isoleucine and threonine) are replaced with a different amino acid that doesn't (e.g. valine), are also componentry to this disclosure, as is their use (e.g. for at least one use disclosed herein). In a true retroinverse (part or entirety) sequence of/in this disclosure, L-isoleucine (S,S) is substituted for D-isoleucine (R,R) {but its substitution at zero or more places by D-allo-isoleucine (R,S) is also contemplated}, L-threonine (S,R) is substituted for D-threonine (R,S) {but its substitution at zero or more places by D-allo-threonine (R,R) is also contemplated}.

[1342] Componentry to this disclosure is any peptide/protein/amino acid sequence of/in this disclosure, wherein one or more of the following features applies (and when a peptide/protein/amino acid sequence is presented/referred to herein, in alternative embodiments, this referral is to the sequence modified such that one or more of the following features apply to it) [wherein all possible combinations below are contemplated {including all possible combinations of elements/descriptors within, and across, different bullet points} except those that are mutually exclusive]:
[1343] (1) Esterification of one or more carboxyl groups (e.g. at the C-terminal end and/or upon the side-chain of one or more aspartic acid (D) and/or glutamic acid (E) residues), e.g. as described in (with a moiety to attach selected from the options therein) one or more of (all incorporated herein, in their entirety, by reference) U.S. Pat. No. 9,790,483B2, U.S. Pat. No. 10,258,695B2, U.S. Pat. No. 10,428,323B2, U.S. Pat. No. 10,577,303B1, US2020/0032238A1, [193-194] and papers/patents/patent applications that cite one or more of these, preferably wherein the attached moiety, attached by an esterase labile ester bond, is hydrophobic (preferably neutral or positively charged), optionally wherein the attached moiety is (wherein it is shown below attached):

[chemical structure]

wherein R_{A} is (independently at each point of use) an alkyl or alkoxy (optionally at the para position on the indicated phenyl ring) or halogen, n is between 0 and 3, R is an alkyl, alkenyl, alkynyl group or hydrogen, R_{M} is an alkyl, alkenyl, alkynyl, cycloalkyl, aryl, or arylalkyl group which is optionally substituted with one or more alkyl, alkoxy, aryl, alkylaryl, halogen, haloalkyl, or haloalkoxy group, for example:

[chemical structure]

[1344] Optionally, wherein this esterification confers/assists cellular penetration, and/or renders less susceptibility to protease(s) action.
[1345] (2) Corresponding homo-amino acid, beta-homo-amino acid, N-methyl amino acid, alpha-methyl amino acid at one or more places in the sequence.
[1346] (3) D-amino acid in place of the corresponding L-amino acid, at one or more places. Replacement of one or more L-amino acid residues with one or more D-amino acid residues.
[1347] (4) D-amino acid(s) inserted at one or more places.
[1348] (5) In some embodiments, the peptide/protein comprises L amino acids. In some embodiments, the peptide/protein comprises D amino acids. In some embodiments, the peptide/protein comprises a mixture of D and L amino acids.
[1349] (6) L-isoleucine (S,S) substituted for, independently selected at each place of its substitution, D-isoleucine (R,R), or D-allo-isoleucine (R,S), or L-allo-isoleucine (S,R).
[1350] (7) L-threonine (S,R) substituted for, independently selected at each place of its substitution, D-threonine (R,S), or D-allo-threonine (R,R), or L-allo-threonine (S,S).
[1351] (8) Replacement of one or more amino acid residues with one or more non-natural/non-proteinogenic/non-eukaryote amino acid residues (incidentally, pyrrolysine is an example of a non-eukaryote amino acid). Insertion/substitution at one or more positions with a non-classical amino acid (e.g. an amino acid not ordinarily used by humans/mammals/eukaryotes/living systems). Some examples can be found in U.S. Pat. No. 10,626,147B2. If selecting to do this, preferred is to substitute a natural amino acid with a congener of that amino acid, wherein this is done at one or more places in the sequence, and/or one or more congeners of natural amino acids are inserted into the sequence. In some embodiments, one or more natural amino acids are replaced with a correspondingly, independently selected in each case, isosteric and/or isoelectronic non-natural amino acid. Preferred replacement(s) aren't recognised by degrading protease(s) and/or decrease the (potential) susceptibility of the peptide/protein to enzymatic degradation in the blood/body of a subject e.g. by removing a (potential) proteolytic attack/recognition site(s), most preferably wherein they increase the activity of the peptide/protein against its desired target(s) because of increased peptide/protein stability in the subject (so any reduced affinity to the peptide/protein's desired target(s), if applicable, is outweighed by more peptide/protein available for hitting the desired target(s), such that the total drug action, per unit drug, is increased, most preferably wherein the replacement(s) also actually increases the peptide/protein's affinity for the desired target(s)). Not only is replacement/insertion/deletion of an amino acid(s) in a suspected/proven protease recognition site(s) contemplated, but also near it (in the 2-D sequence and/or 3-D space), optionally wherein the addition/substitution of an amino acid(s) nearby blocks/restricts/reduces protease enzyme(s) access to its recognition site(s), optionally wherein a non-natural amino acid(s) may be used, optionally wherein at least one has a constrained/bulky amino acid side chain (e.g. [non-limiting] proline analogue(s), cyclo amino acid(s) {e.g. amino-cyclopropylcarboxylic acid}, Ca-disubstituted derivative(s) {e.g. aminoisobutyric acid}), such that proteolytic hydrolysis of the nearby peptide bond is conformationally/sterically impeded.
[1352] (9) Some non-limiting examples of non-natural amino acids to incorporate by substitution and/or insertion is any non-natural amino acid mentioned elsewhere herein and 1-naphthylalanine, 2-naphthylalanine, cyclohexylglycine, phenylglycine, tert-butylglycine, 3,4-dichlorophenylalanine, 4-fluorophenylalanine, homophenylalanine, 4-bromophenylalanine, pentafluorophenylalanine, N-methylphenylalanine, 4-chlorophenylalanine, cyclohexylalanine, ornithine, 2-amino butyric acid, N-methylglycine, N-methylalanine, N-methylleucine, norleucine, 3-amino-5-phenylpentanoic acid, 2,3-diaminopropionic acid, 2-amino butyric acid, citrulline, sarcosine, desmosine, norvaline, 4-aminobutyric acid, 2-aminobutyric acid, 6-aminohexanoic acid, 2-aminobenzoic acid, 4-aminobenzoic acid, 2,3-diaminopropionic acid, 2,4-diaminobutyric acid, cycloserine, carnitine, cystine, penicillamine, pyroglutamic acid, thienylalanine, hydroxyproline, allo-isoleucine, allo-threonine, isonipecotic acid, isoserine, statine, B-alanine, N-methyl amino acids, B-amino acids or Y-amino acids among others, as well as their derivates. A non-limiting list of unnatural amino acids can be found in “Unusual amino acids in peptide synthesis” by DC Roberts and F Vellaccio, in The Peptides, Gross E. and Meienhofer J. Eds. Academic Press, NY, USA and/or in the commercial catalogues of the companies specialized in the field, such as PolyPeptide Laboratories, Bachem, Novabiochem, Sigma-Aldrich, Peptides International, Advanced ChemTech, Chem-Impex, Maybridge Chemical, Chirotech Technology, Peninsula Laboratories or RSP Amino Acid Analogues among others.
[1353] (10) Replacement of one or more amino acid residues with one or more amino acid mimetics.
[1354] (11) Replacement of one or more amino acid residues with, and/or insertion of, one or more non-natural acids with a side-chain comprising a long (linear or branched, between 2-100 carbon atoms, preferably >10 and <20) aliphatic chain.
[1355] (12) Selenomethionine and/or N-formylmethionine in place of methionine at one or more places, hydroxyproline in place of proline at one or more places.
[1356] (13) Replacement of one or more amino acid residues with an alanine residue(s), e.g. as part of an “alanine scan”, e.g. to modify a (potential or proven) protease(s) recognition site(s).
[1357] (14) Replacement of one or more oxidation sensitive amino acid residues with one or more oxidation resistant amino acid residues.
[1358] (15) D-amino acid(s), and/or other non-proteinogenic amino acid(s), substituted/inserted at the N- and/or C-terminal ends to decrease susceptibility to exopeptidases. L-amino acid at N- and/or C-terminal end substituted for corresponding D-amino acid (illustrative e.g. L-arginine substituted for D-arginine).
[1359] (16) One or more D-amino acids, and/or other non-proteinogenic amino acid(s), are inserted/substituted into the unmodified sequence, and/or the amino acid sequence is changed (“conservative” substitution(s) preferred e.g. refer U.S. Pat. No. 9,255,124B2), and/or one or more amino acids are modified (e.g. with an amino acid modification(s) mentioned herein), at a site(s) in the sequence that is predicted to be susceptible to attack by an endopeptidase(s)/protease(s) (that is present in one or more of the species that will be administered, e.g. as predicted by https:/web.expasy.org/peptide_cutter/; so eliminating any relevant endopeptidase(s) recognition site(s) from the amino acid sequence) or that is actually observed to be a point of proteolysis by analysing fragments of the unmodified sequence after incubation with biological matter (from a species to be administered) for a specified period of time e.g. serum (optionally wherein after modification(s), this experiment is repeated and if an undesirable level of proteolysis is still occurring, the fragment species are again analysed, and a different modification(s) made accordingly). This method is componentry to this disclosure.
[1360] (17) Replacement of a negatively charged amino acid with a non-negatively charged amino acid at one or more positions.
[1361] (18) “Membrane permeant derivative” refers to a chemical derivative of a compound with increased membrane permeability of the compound, optionally because one or more hydrophilic groups are masked, optionally wherein these masking groups are cleaved off once inside the cell e.g. refer U.S. Pat. No. 5,741,657 for some non-limiting guidance.
[1362] (19) N-terminal and/or C-terminal modification(s). Including N- and/or C-terminus capping (introduction of a blocking group to the terminus via a covalent modification) to hamper endopeptidase activity, preferably wherein the added group(s) doesn't hamper the desired activity of the peptide/protein, preferably wherein the added group(s) increases lipophibicity of the peptide/protein. For non-limiting example, amidation/esterification of the C-terminus and/or acylation (e.g. acetylation) of the N-terminus. “Capping” with a different acyl group, more hydrophobic than acetyl, is herein contemplated. For non-limiting example, in increasing order of hydrophobicity (from less to more): formyl, acetyl, propanoyl, hexanoyl, myristoyl, palmitoyl, stearoyl. “Capping” the N-terminus with a benzyl group is contemplated, or a biotin group, or a protective group selected from a collection consisting of benzyloxycarbonyl (Z), terbutyloxycarbonyl (tPoc), fluorenylmethyloxycarbonyl (Fmoc), and allyloxycarbonyl (Alloc) groups. In some embodiments, a modified derivative comprises an N-terminal modification using suitable amino reactive chemistry, and/or C-terminal modification using suitable carboxy-reactive chemistry.
[1363] (20) Conjugation to one or more molecules/amino acid sequences that bind albumin (albumin-binding molecules).
[1364] (21) One or more fatty acids (or derivatives thereof) conjugated to the peptide/protein (preferably just one thereof conjugated). For non-limiting example, fatty acid attached to the N-terminus as an acyl group (illustrative e.g. myristoyl or palmitoyl or stearoyl group attached to N-terminus), and/or fatty acid bound to at least one amino acid side-chain (non-limiting e.g. to lysine side-chain, conjugated directly, or indirectly via a “spacer” moiety between), wherein the fatty acid can comprise/contain from 2 to 100 carbons, preferably >10 and <25 carbons, be saturated or unsaturated, linear or branched, substituted or non-substituted (e.g. hydroxylated or non-hydroxylated, e.g. sulfurated [e.g. SOH, SH or S-S] or non-sulfurated), cyclic or non-cyclic. A conjugated fatty acid(s) to a peptide/protein can confer self-association and/or its binding to albumin in the blood, which (sterically) decreases protease(s) access to it, and/or slows its renal clearance, thence increasing its half-life in blood (e.g. from minutes to hours). Conjugation of a fatty acid(s) reported/predicted to bind albumin is especially preferred, and/or conjugation of a fatty acid (and optionally its “spacer” moiety if applicable) present in a licensed/clinical candidate peptide/protein based drug, e.g. in one or more of insulin detemir, insulin degludec, liraglutide, semaglutide. Conjugation of a fatty acid(s), e.g. conjugation with palmitic acid (palmitoylation), can increase skin penetration of a peptide/protein. Contemplated is the binding of a fatty acid (or derivative thereof) to an already present or introduced/substituted in cysteine in the amino acid sequence, optionally via a disulphide bond, optionally wherein the fatty acid derivative chain is [hydrogen atoms not shown]: S—C—C(COOH)—N—C(O)—(C)ₙ wherein n is between 2 and 100, preferably between 2 and 25, wherein (C)ₙ can be linear or branched, saturated or unsaturated (or the fatty acid derivative is one found in one or more of [196], U.S. Pat. Nos. 5,907,030, 6,093,692, U.S. Pat. No. 6,225,445B1, U.S. Pat. No. 7,052,704B2, US2013/0053433A1, WO96/22773).
[1365] (22) Attachment (e.g. covalent) of one or more fatty acid molecules (optionally which can confer {optionally via conferring self-binding} binding to albumin in the blood, conferring less susceptibility to proteases and longer half-life in the blood [incidentally, as per the strategy used with Liraglutide]).
[1366] (23) An N-terminal and/or C-terminal modification shown in U.S. Pat. No. 8,946,166B2 (and/or in one or more of U.S. Pat. No. 9,067,967B2, U.S. Pat. No. 9,315,564B2, US2013/0078295A1, US2014/0322307A1, WO2014/170347A1, U.S. Pat. No. 6,372,717B1, U.S. Pat. No. 6,620,419B1, U.S. Pat. No. 6,974,799B2, U.S. Pat. No. 7,182,963B2, U.S. Pat. No. 7,998,493B2, U.S. Pat. No. 8,404,648B2, U.S. Pat. No. 10,660,839B2, U.S. Pat. No. 10,668,000B2, U.S. Pat. No. 10,668,000B2, US2004/0132667A1, US2018/0000717A1, WO2019149450A1, U.S. Pat. No. 7,863,417B2, U.S. Pat. No. 7,671,009B2).
[1367] (24) One or more cysteine residues, with a cholesterol derivative (e.g. cholesterol modified with a cysteine-reactive 2-bromoacetyl moiety) attached to its side-chain, are inserted/substituted into the amino acid sequence, optionally in place of unmodified cysteine(s).
[1368] (25) Modification at the C-terminus to remove its negative charge (and, optionally, simultaneously to increase lipophibicity e.g. a lipophilic moiety [e.g. cholesteryl/cholesterol moiety] attached to the C-terminus by an ester bond), for example by amidation, or by esterification, optionally wherein at the C-terminus, instead of COOH, there is C(O)R or C(O)N(H)R or C(O)NR₂ or R, and/or at the N terminus instead of NH₂ there is N(H)R or NR₂ or H or D or R or CH₃ or C(H₂)R or C(H)R₂ or CR₃, wherein R is independently at each point of use selected from alkyl (e.g. C(CH₃)₃), substituted alkyl (non-limiting examples: CF₃, CCl₃), deuterated alkyl (non-limiting example: CD₃), aminoalkyl, thioalkyl, alkoxy, halogen, haloalkyl, haloalkoxy, any atom or isotope permitted by valence (including any accompanying hydrogen(s)/deuterium(s) by valence e.g. (non-limiting), H, NH₂, SH, SiH₃, PH₂, BH₂ etc.) including, without limitation, La, Ti, Ce, V, Ta, Cr, Mo, Mn, Fe, Ru, Os, Co, Pd, Pt, Cu, Ag, Au, Zn, B, Al, Ga, C, Si, N, P, As, Sb, Bi, O, S, Se, F, Cl, Br, I, Hg.
[1369] (26) Modification(s) of one or more amino acids of an amino acid sequence of/in this disclosure, wherein the modification(s) is known to/predicted by those of the art to increase the plasma stability/half-life of a peptide/protein (e.g. by reducing susceptibility to cleavage by protease(s)), for example, wherein this has been shown with one or more peptide/protein examples in the literature.
[1370] (27) Modification(s) of one or more amino acids of an amino acid sequence of/in this disclosure, wherein the modification(s) is known to/predicted by those of the art to increase the lipophibicity/cellular penetration/ability to cross a biological/plasma membrane of a peptide/protein.
[1371] (28) Peptide/protein is N^{α}-alkylated (e.g. N^{α}-methylated) at one or more places. N-alkylation of one or more amide bonds within the peptide/protein.
[1372] (29) Substitution of the hydrogen on the alpha-carbon of one or more amino acid residues with another, independently selected in each case, chemical group.
[1373] (30) Peptide backbone length modification.
[1374] (31) Replacement of one or more peptide bonds with a surrogate bond.
[1375] (32) Non-peptide backbones or non-peptide backbone regions, including a peptoid backbone (e.g. as discussed in U.S. Pat. No. 6,730,293B1, as used in a CPP in and U.S. Pat. No. 6,730,293B1 [plus refer references therein], wherein use of any CPP in that paper/patent is hereby contemplated for the present disclosure), are hereby contemplated. In a peptoid backbone, sidechains are attached to the backbone nitrogen atoms rather than the backbone carbon atoms. Peptoid derivatives of the peptide/proteins of this disclosure may be readily designed from knowledge of the amino acid sequence. Retropeptoids (in which all amino acids are replaced by peptoid residues in reversed order) are also suitable derivatives in accordance with this disclosure. Peptide and/or peptoid and/or retropeptoid hybrids are contemplated.
[1376] (33) One or more post-translational modifications.
[1377] (34) Modification (e.g. a post-translational modification(s)) of one or more amino acid residues. Illustrative modifications include, without restriction, N-terminus modification(s), C-terminus modification(s), backbone modification(s), peptide bond modification(s) (e.g. —CH₂—NH—, —CH₂—S—, —CH₂S═O, O═C—NH, —CH₂—O—, —CH₂—CH₂—, S—C—NH—, —CH═CH—, —CF═CH—), removing the initiator methionine residue, adding an initiator methionine residue, attachment of one or more blocking/protecting groups (e.g. N- and/or C-terminal blocking group), derivatization, proteolytic cleavage(s), linkage to a cellular ligand(s) and/or other protein(s)/peptide(s)/amino acid sequence(s), isomerization, methylation (e.g. of one or more lysine and/or arginine residues), alkylation, halogenation (e.g. chlorination), phosphorylation (e.g. of one or more serine, threonine, tyrosine, aspartic acid, histidine residues), glycation, glycosylation, O-linked glycosylation, N-linked glycosylation, C-linked glycosylation, attachment of one or more of a sugar/carbohydrate/glycan (mono- or polysaccharide) at one or more places (e.g. on an amino-acid side-chain(s) and/or at one or more points on the peptide/protein backbone), lipidation, acylation (N-terminal or other), acetylation (N-terminal or other), amidation (for example upon the C-terminus), deamidation, formylation (e.g. of N-terminal methionine), sulfation, sulfatation (e.g. of one or more tyrosine residues), succinylation, butyrylation, carbamylation, carbonylation, oxidation, biotinylation, PEGylation, polyethylene glycol (PEG) chain(s) are attached covalently, cyclization, backbone modification, gamma-carboxylation, gamma-carboxyglutamic acid hydroxylation (e.g. of one or more of asparagine, aspartic acid, proline, lysine residues), pyrrolidone carboxylic acid (e.g. N-terminal glutamate that has formed an internal cyclic lactam), polysialylation, malonylation, hydroxylation, iodination, nucleotide addition (e.g. ADP-ribosylation), phosphate ester (O-linked) or phosphoramidate (N-linked) formation, adenylylation, uridylylation, propionylation, pyroglutamate formation, S-glutathionylation, S-nitrosylation, S-sulfenylation, S-sulfinylation, S-sulfonylation, myristoylation, palmitoylation, stearoylation, isoprenylation/prenylation, farnesylation, geranilgeranilatyon, glipyatyon, glycosylphosphatidylinositol (GPI) anchor formation, lipoylation, disulphide bond(s) formation between two or more cysteine residues in the amino acid sequence, covalent binding of one or more lipid moieties to one or more amino acid residues, phosphopantetheinylation, one or more flavin moietys (FMN or FAD) may be covalently attached, heme C attachment via thioether bonds with cysteines, retinylidene Schiff base formation, ubiquitination, SUMOylation, one or more of a myristate, palmitate, farnesyl, geranyl-geranyl, GPI-anchor, N-acyl diglyceride group attached to one or more amino acid residues, a myristate group attached through an amide bond to the N-terminal glycine residue of the mature form of a protein and/or to an internal lysine residue(s), palmitate group attached through a thioether bond to one or more cysteine residues or through an ester bond to one or more serine and/or threonine residues, farnesyl group attached through a thioether bond to one or more cysteine residues, geranyl-geranyl group attached through a thioether bond to one or more cysteine residues, glycosyl-phosphatidylinositol (GPI) group linked to the alpha-carboxyl group of the C-terminal residue of the mature form of a protein, N-terminal cysteine of the mature form of a lipoprotein with an amide-linked fatty acid and a glyceryl group to which two fatty acids are linked by ester linkages, non-covalent complexation with pyrene butyrate.
[1378] (35) Modification of amino acids such as cysteine, lysine, glutamate/aspartate and tyrosine with suitable amine, thiol, carboxylic acid and phenol-reactive reagents so as to functionalize said amino acids, and introduction or replacement of amino acids that introduce orthogonal reactivities that are suitable for functionalization, for example azide or alkyn-group bearing amino acids that allow functionalization with alkyn or azide-bearing moieties, respectively. Post-synthetic bioorthogonal modification of the amino acids cysteine, lysine, glutamate and/or tyrosine with suitable amine, thiol, carboxylic acid and phenol-reactive reagents.
[1379] (36) A cysteine analogue can be used in place of cysteine at one or more places. Particular cysteine analogues include D-cysteine, homocysteine, alpha-methyl cysteine, mercaptopropionic acid, mercaptoacetic acid, penicillamine, acetylated forms of those analogues capable of accepting an acetyl group, acetylated homocysteine, acetylated penicillamine, acetylated alpha-methyl cysteine, cysteine analogue modified with blocking group(s).
[1380] (37) Selenocysteine is an amino acid which has a similar reactivity to cysteine and can be used for some the same reactions. Thus, wherever cysteine is mentioned/presented herein, in alternative embodiments, it is typically acceptable to substitute selenocysteine unless the context suggests otherwise.
[1381] (38) In some embodiments, one or more tryptophan residues are replaced with (independently selected at each point of replacement) a naphthylalanine or alanine residue, or an amino acid residue in the equivalent position in IF1 protein of a different species, which can improve the pharmaceutical stability profile.
[1382] (39) In some embodiments, an N-terminal and/or C-terminal modification comprises the addition (optionally via a spacer/linker region[s]) of an effector/functional group(s), including (but not limited to) a cell penetrating moiety/moieties, cytotoxic agent(s), drug(s), radiochelator(s) {which is suitable for complexing metal radioisotope(s) of medicinal relevance; such effectors, when complexed with said radioisotopes, can present useful agents for cancer therapy etc.}, chromophore(s), enzyme(s), antibody[y/ies] and/or binding fragments thereof (e.g. binding of which can increase half-life in vivo).
[1383] (40) One or more of the following substitutions is made at one or more places (wherein each substitution is independently selected from [if applicable] introducing the D- or L-form, wherein introduction of the L-form is favoured in some embodiments): Aspartic Acid (Asp) for Asparagine (Asn) or vice-versa; Glutamic Acid (Glu) for Glutamine (Gln) or vice-versa; 2-Aminoadipic acid (Aad) for Aspartic acid (Asp) or Glutamic acid (Glu) or other amino acid; 3-Aminoadipic acid (bAad) for Aspartic acid (Asp) or Glutamic acid (Glu) or other amino acid; beta-Alanine (bAa) for Glycine, Alanine (Ala), Valine (Val), Isoleucine (Ile), Leucine (Leu) or other amino acid; 2-Aminobutyric acid (Abu) for Glycine (Gly), Alanine (Ala), Valine (Val), Isoleucine (Ile), Leucine (Leu) or other amino acid; 4-Aminobutyric acid (4Abu) for Glycine (Gly), Alanine (Ala), Valine (Val), Isoleucine (Ile), Leucine (Leu) or other amino acid; 6-Aminocaproic acid (Acp) for Glycine (Gly), Alanine (Ala), Valine (Val), Isoleucine (Ile), Leucine (Leu) or other amino acid; 2-Aminoheptanoic acid (Ahe) for Glycine (Gly), Alanine (Ala), Valine (Val), Isoleucine (Ile), Leucine (Leu) or other amino acid; 2-Aminoisobutyric acid (Aib) for Glycine (Gly), Alanine (Ala), Valine (Val), Isoleucine (Ile), Leucine (Leu) or other amino acid; 3-Aminoisobutyric acid (bAib) for Glycine (Gly), Alanine (Ala), Valine (Val), Isoleucine (Ile), Leucine (Leu) or other amino acid; 2-Aminopimelic acid (Apm) for Aspartic acid (Asp) or Glutamic acid (Glu) or other amino acid; 2,4 Diaminobutyric acid (Dbu) for Arginine (Arg) or Histidine (His) or Lysine (Lys) or other amino acid; 2,2-Diaminopimelic acid (Dpm) for Aspartic acid (Asp) or Glutamic acid (Glu) or Asparagine (Asn) or Glutamine (Gln) or other amino acid; 2,3-Diaminopropionic acid (Dpr) for Arginine (Arg) or Histidine (His) or Lysine (Lys) or other amino acid; N-Ethylglycine (EtGly) for Glycine (Gly) or other amino acid; N-Ethylasparagine (EtAsn) for Asparagine (Asn) or other amino acid; Hydroxylysine (Hyl) for Lysine (Lys) or other amino acid; allo-Hydroxylysine (aHyl) for Lysine (Lys) or other amino acid; 3-Hydroxyproline (3Hyp) for Proline (Pro) or other amino acid; 4-Hydroxyproline (4Hyp) for Proline (Pro) or other amino acid; allo-Isoleucine (aIle) for Glycine (Gly), Alanine (Ala), Valine (Val), Isoleucine (Ile), Leucine (Leu) or other amino acid; N-Methylglycine/sarcosine (MeGly) for Glycine (Gly), Alanine (Ala), Valine (Val), Isoleucine (Ile), Leucine (Leu) or other amino acid; N-Methylisoleucine (MeIle) for Glycine (Gly), Alanine (Ala), Valine (Val), Isoleucine (Ile), Leucine (Leu) or other amino acid; 6-N-Methyllysine (MeLys) for Arginine (Arg) or Histidine (His) or Lysine (Lys), Glycine (Gly), Alanine (Ala), Valine (Val), Isoleucine (Ile), Leucine (Leu) or other amino acid; N-Methylvaline (MeVal) for Glycine (Gly), Alanine (Ala), Valine (Val), Isoleucine (Ile), Leucine (Leu) or other amino acid; Norvaline (Nva) for Glycine (Gly), Alanine (Ala), Valine (Val), Isoleucine (Ile), Leucine (Leu) or other amino acid; Norleucine (Nle) for Glycine (Gly), Alanine (Ala), Valine (Val), Isoleucine (Ile), Leucine (Leu) or other amino acid; Ornithine (Orn) for Arginine (Arg) or Histidine (His) or Lysine (Lys) or other amino acid.
[1384] (41) Substitution/insertion/deletion of one or more amino acids.
[1385] (42) Proteolytic/chemically cleaved at one or more places.
[1386] (43) Covalent attachment of a molecule/protein/ligand.
[1387] (44) Modified at one or more places with a peptide/protein modification(s) of the art.

### Peptide/Protein Synthesis

[1388] All amino acid sequences described herein can be prepared by chemical synthesis using either automated or manual solid phase synthetic technologies, known in the art. In some embodiments, peptides are produced by Fmoc synthesis, analysed by mass spectrometry, and purified by HPLC, all clear to those of the art (e.g. refer U.S. Pat. No. 8,080,517B2). How to synthesize an amino acid or nucleotide sequence is well known in the art. For non-limiting example, an amino acid sequence can be synthesized in-house using a fully automatic peptide synthesizer (e.g. model 431A of Applied Biosystems, e.g. a peptide synthesizer from Gyros Protein Technologies, Tucson, AZ, USA, e.g. “Liberty Blue” Automated Microwave Peptide Synthesizer from CEM Corporation, Matthews, NC, USA) or sourced from a protein synthesis company e.g. GenScript, Piscataway, NJ, USA, e.g. Biomatik, Kitchener, Ontario, Canada, e.g. Peptide 2.0, Chantilly, VA, USA, e.g. Bachem AG, Bubendorf, Switzerland, e.g. LifeTein, Somerset, New Jersey, e.g. Cambridge Research Biochemicals, Billingham, Cleveland, UK, e.g. Pepscan, Lelystad, Netherlands.

[1389] Some useful resources for methods of solid phase peptide/protein synthesis: Stewart M and Young J D (1984) “Solid Phase Peptide Synthesis, 2nd edition” Pierce Chemical Company, Rockford, Ill; Bodanzsky M and Bodanzsky A (1984) “The practice of Peptide Synthesis” Springer Verlag, NY; Lloyd-Williams P, Albericio F and Giralt E (1997) “Chemical Approaches to the Synthesis of Peptides and Proteins” CRC, Boca Raton, Fla., USA, Atherton B and Sheppard RC (1989) “Solid Phase Peptide Synthesis: A practical approach” IRL Oxford University Press. Some different/variant methods of peptide protein synthesis are disclosed in (for example) Lloyd Williams P, Albericio F, Giralt E (1993) “Convergent solid phase peptide synthesis” Tetrahedron 49:11065-11133; Kullmann W (1980) “Proteases as catalysts for enzymic syntheses of opioid peptides” J. Biol. Chem. 255:8234-8238; Smith M B, March J “March's Advanced Organic Chemistry Reactions, Mechanisms and Structure”, John Wiley & Sons, NJ, USA.

[1390] For example, a non-limiting method of obtaining a peptide/protein of this disclosure comprises the steps of:
[1391] coupling an amino acid with the N-terminal end protected and the C-terminal end free, on to an amino acid with the N-terminal end free and the C-terminal end protected or bound to a solid support;
[1392] removing the protective group of the N-terminal end;
[1393] repetition of the sequence of coupling and removal of the protective group of the N-terminal end until the desired peptide/protein sequence is obtained;
[1394] removal of the protective group of the C-terminal end or cleavage from the solid support.

[1395] Preferably, the C-terminal end is bound to a solid (e.g. polymer) support and the process is conducted on solid phase.

[1396] During the above, the functional groups of the side chains of the amino acids are adequately protected with temporary/permanent protective groups, and are de-protected simultaneously, or orthogonally, to the process of cleaving the completed peptide/protein from the solid support.

[1397] Examples of different protecting groups that can be used during peptide/protein synthesis for each of the N-terminus (e.g. an amide, or e.g. Boc or Fmoc), C-terminus (e.g. an ester), and for different functional groups of different amino acid side-chains can be found in (for example) U.S. Pat. No. 8,946,166B2 (which teaches methods of peptide/protein synthesis), and references therein: e.g. Greene T W and Wuts P G M (1999) “Protective groups in organic synthesis” John Wiley & Sons, NY, USA, wherein U.S. Pat. No. 8,946,166B2 also discloses materials (e.g. polymeric), with supporting references, that can be used as the solid support. Optional modification of the N-terminal and C-terminal ends can be conducted whilst the peptide/protein is still bound to the solid support or after it has been cleaved off.

[1398] Alternatively, an amino acid sequence(s) (peptide[s]/protein[s]) of this disclosure can be produced by a recombinant method(s) of the art, optionally utilizing E. Coli or Saccharomyces cerevisiae.

Some Illustrative Polynucleotide Sequences of this Disclosure

[1399] DNA sequence encoding SEQ ID NO:130 (example epitope tag) concatenated to DNA sequence encoding SEQ ID NO:461 (RRRRRRRG, example CPP sequence) concatenated to DNA sequence encoding SEQ ID NO:162 (human Mitochondrial Import Sequence [MIS] for its IF1 protein) concatenated to DNA sequence encoding complete “mature” (without MIS) IF1 protein from bowhead whale (using “mature” [without MIS] IF1 protein numbering: residues 1-82 of bowhead whale IF1 protein; residues 26-107 of SEQ ID NO:336), with codon selection optimized for the codon bias of E. coli (SEQ ID NO:1426), S. cerevisiae (SEQ ID NO:1427), or Homo sapiens (SEQ ID NO:1428). SEQ ID NO:1429 to SEQ ID NO:1446 follow this same pattern, showing different DNA sequences optimized for expression in those different species, but wherein the encoded bowhead whale IF1 protein component is instead, in turn, residues (using “mature” [without MIS] IF1 protein numbering) 1-60, 10-60, 14-60, 13-47, 14-47, 42-58 of bowhead whale IF1 protein. SEQ ID NO:1447 to SEQ ID NO:1467, and SEQ ID NO:1468 to SEQ ID NO:1488, are each the same as SEQ ID NO:1426 to SEQ ID NO:1446 respectively except that blue whale and human IF1 protein respectively are encoded instead. SEQ ID NO:1489 to SEQ ID NO:1500 are the same as SEQ ID NO:1426 to SEQ ID NO:1437 respectively except that these sequences confer (using “mature” [without MIS] IF1 protein numbering) a H49K substitution in their encoded IF1 protein/fragment component. SEQ ID NO:1501 to SEQ ID NO:1518 are the same as SEQ ID NO:1447 to SEQ ID NO:1464 respectively except that these sequences confer (using “mature” [without MIS] IF1 protein numbering) T14A and H49K substitutions in their encoded IF1 protein/fragment component. SEQ ID NO:1519 to SEQ ID NO:1536 are the same as SEQ ID NO:1468 to SEQ ID NO:1485 respectively except that these sequences confer (using “mature” [without MIS] IF1 protein numbering) S14A and H49K substitutions in their encoded IF1 protein/fragment component. SEQ ID NO:1537 to SEQ ID NO:1647 are the same as SEQ ID NO:1426 to SEQ ID NO:1536 respectively except that a different CPP sequence is encoded instead (a Tat sequence flanked by glycines, GYGRKKRRQRRRG, SEQ ID NO:445), the encoded MIS is that for mouse's IF1 protein instead (SEQ ID NO:163), and codon selection is optimized for the codon bias of Mus musculus instead of Homo sapiens. SEQ ID NO:1648 to SEQ ID NO:1683 are the same as SEQ ID NO:1426, SEQ ID NO:1427, SEQ ID NO:1428, SEQ ID NO:1447, SEQ ID NO:1448, SEQ ID NO:1449, SEQ ID NO:1468, SEQ ID NO:1469, SEQ ID NO:1470, SEQ ID NO:1468, SEQ ID NO:1469, SEQ ID NO:1470, SEQ ID NO:1489, SEQ ID NO:1490, SEQ ID NO:1491, SEQ ID NO:1501, SEQ ID NO:1502, SEQ ID NO:1503, SEQ ID NO:1519, SEQ ID NO:1520, SEQ ID NO:1521, SEQ ID NO:1537, SEQ ID NO:1538, SEQ ID NO:1539, SEQ ID NO:1558, SEQ ID NO:1559, SEQ ID NO:1560, SEQ ID NO:1579, SEQ ID NO:1580, SEQ ID NO:1581, SEQ ID NO:1600, SEQ ID NO:1601, SEQ ID NO:1602, SEQ ID NO:1612, SEQ ID NO:1613, SEQ ID NO:1614, SEQ ID NO:1630, SEQ ID NO:1631, SEQ ID NO:1632 respectively except that they display a consensus DNA sequence, encompassing the use of a number of codons at a number of positions, given the codon bias of the species, rather than just a single codon at each position. From these presented consensus DNA sequences one of the art can arrive at consensus sequences for the other aforementioned DNA sequences, for which a consensus sequence is not presented. Any of SEQ ID NO:1426 to SEQ ID NO:1536 can have its coding region for the CPP component, and/or coding region for the MIS component, substituted with the CPP component, and/or MIS component, coding regions of SEQ ID NO:1537. Similarly, any of SEQ ID NO:1537 to SEQ ID NO:1647 can have its coding region for the CPP component, and/or coding region for the MIS component, substituted with the CPP component, and/or MIS component, coding regions of SEQ ID NO:1426. These DNA sequences but with a different CPP component coding region, coding for a different CPP, optionally coding for one or more of SEQ ID NO:124 to SEQ ID NO:126 (and/or one or more of SEQ ID NO:440 to SEQ ID NO:638), and/or with a different MIS coding region (e.g. coding for an MIS from a different species), and/or with a different IF1 protein/fragment (or sequence variant thereof) coding region (e.g. coding for that from a different species and/or a different fragment thereof, comprising a different residues range) are hereby contemplated, as are their encoded amino acid sequences, and peptides/proteins thereof. Any sequence selected from SEQ ID NO:1426 to SEQ ID NO:1536 with a part of it substituted with the exactly corresponding part (same range of nucleotide position numbers) of a different sequence selected from SEQ ID NO:1426 to SEQ ID NO:1536, but preferably with the caveat that only whole codons are substituted (no substitution if one or both the ends of the substituted sequence fall within a codon), and wherein the modified (if applicable) protein sequence encoded is also componentry to this disclosure. This affords the possibility of the IF1 protein/fragment (or sequence variant thereof) component to be a fusion of that from two or more of human, blue and bowhead whale. For example, wherein the IF1 protein/fragment (or sequence variant thereof) component is (using “mature” [without MIS] IF1 protein numbering), up to the encoded 47^{th} amino acid residue, from human or blue whale, and its remainder is from bowhead whale, wherein the amino acid sequence of this novel human or blue whale and bowhead whale IF1 protein/fragment (or sequence variant thereof), as a separate sequence embodiment, is also componentry to this disclosure. Any sequence selected from SEQ ID NO:1537 to SEQ ID NO:1647 with a part of it substituted with the exactly corresponding part (same range of nucleotide position numbers) of a different sequence selected from SEQ ID NO:1537 to SEQ ID NO:1647, but preferably with the caveat that only whole codons are substituted (no substitution if one or both the ends of the substituted sequence fall within a codon), and wherein the modified (if applicable) protein sequence encoded is also componentry to this disclosure (and partially/completely retroinverse sequence thereof). To illustrate, and not restrict, residues 1-282 of any one of SEQ ID NO:1468, SEQ ID NO:1469, SEQ ID NO:1470, SEQ ID NO:1471, SEQ ID NO:1472, SEQ ID NO:1473, SEQ ID NO:1519, SEQ ID NO:1520, SEQ ID NO:1521, SEQ ID NO:1522, SEQ ID NO:1523, SEQ ID NO:1524, SEQ ID NO:1447, SEQ ID NO:1448, SEQ ID NO:1449, SEQ ID NO:1450, SEQ ID NO:1451, SEQ ID NO:1452, SEQ ID NO:1501, SEQ ID NO:1502, SEQ ID NO:1503, SEQ ID NO:1504, SEQ ID NO:1505, SEQ ID NO:1506, SEQ ID NO:1426, SEQ ID NO:1427, SEQ ID NO:1428, SEQ ID NO:1429, SEQ ID NO:1430, SEQ ID NO:1431, concatenated to residues 285-387 or residues 285-321 of any one of SEQ ID NO:1426, SEQ ID NO:1427, SEQ ID NO:1428, SEQ ID NO:1489, SEQ ID NO:1490, SEQ ID NO:1491, SEQ ID NO:1447, SEQ ID NO:1448, SEQ ID NO:1449, SEQ ID NO:1501, SEQ ID NO:1502, SEQ ID NO:1503, wherein the encoded protein sequences are also componentry to this disclosure (and fragments, and concatenated fragments, thereof e.g. without one or more of the epitope/affinity tag, CPP, MIS components; and/or partially/completely retroinverse sequence thereof). By the teaching of the last sentence, equivalent modifications can be made for sequences within the range SEQ ID NO:1537 to SEQ ID NO:1647 (but with different residue numbering because their CPP component is a longer sequence). Fragments (or concatenated fragments) of any of the aforementioned DNA sequences (and their encoded amino acid sequences) are contemplated, for example any of SEQ ID NO:1426 to SEQ ID NO:1683 truncated at their 5′ terminal end by 42 nucleotides (such that they don't encode the epitope/affinity tag component), or truncated further such that they also don't encode the Cell Penetrating Peptide (CPP) component, or truncated even further such that they also don't encode the MIS component. Any of the aforementioned nucleotide/amino acid sequences with one or more of the regions coding for the epitope/affinity tag, Cell Penetrating Peptide (CPP), and MIS components absent are componentry to this disclosure. Not shown, but contemplated, is any of the aforementioned DNA sequences with a stop codon (e.g. tag, taa, tga) added at their 3′ terminal end, and optionally with a termination sequence thereafter (e.g. enables release of RNA polymerase during transcription), wherein any termination sequence of the art is contemplated, including thymine rich region(s) (poly-T tail), cytosine rich region(s), palindromic region(s) etc, wherein illustratively SEQ ID NO:1684 is the termination sequence of the human ATP5IF1 gene. One or more of these DNA sequences, but with their codon use optimized for a different species, is componentry to this disclosure (e.g. by inputting the encoded protein sequence, along with codon bias data for the selected species sourced from https://www.kazusa.or.jp/codon/, into https://www.bioinformatics.org/sms2/rev_trans.html). Also contemplated is for one or more of these DNA sequences to be expressed in mitochondria, instead of transcribed in the nucleus (and translated in the cytoplasm), and to have its codons selected accordingly (mitochondria use slightly different genetic code than nucleus). For a peptide/protein of/in this disclosure, all DNA sequences that code for it by a genetic code, and the mRNA sequences transcribed therefrom, are componentry to this disclosure (as are the sequences of complimentary/base-paired non-coding strands, optionally existing as double-stranded). Given that typically in a genetic code there is more than one codon coding for each amino acid, the number of nucleotide sequences disclosed herein is too great to list, but wherein nonetheless they are all componentry to this disclosure. To illustrate, using the standard genetic code, there are 3.24357*10⁵⁰ DNA sequences coding for the amino acid sequence of human “immature” (with MIS) IF1 protein, and 2.16238*10⁵⁰ DNA sequences coding for the amino acid sequence of human “mature” (without MIS) IF1 protein.

[1400] Polynucleotide comprising (or consisting of) one or more sequences selected from SEQ ID NO:1426 to SEQ ID NO:1684. Peptide/protein comprising (or consisting of) one or more amino acid sequences encoded by SEQ ID NO:1426 to SEQ ID NO:1684 (or fragment thereof, or concatenated fragments thereof, and/or partially/completely retroinverse sequence thereof).

### Polynucleotide Derivative(s) Thereof

[1401] Contemplated by, and componentry to, this disclosure is any nucleotide sequence of/in this disclosure, wherein one or more of the nucleotides are modified with a polynucleotide modification of the art (and when a nucleotide sequence is referred to herein, in alternative embodiments, this referral is to the sequence modified such that one or more of the following apply to it), for non-limiting example, by methylation at one or more places, by addition of a carboxymethylaminomethyl group, addition of a methoxy group etc. For non-limiting example, wherein, at one or more places, a guanosine motif in the polynucleotide sequence is substituted with a group independently selected at each site from queuosine, D-galactosylqueuosine, D-mannosylqueuosine, 2′-O-methylguanosine, 1-methylguanosine, 2,2-dimethylguanosine, 2-methylguanosine, 7-methylguanosine; and/or wherein, at one or more places, an adenosine motif in the polynucleotide sequence is substituted with a group independently selected at each site from inosine, 1-methylinosine, N6-isopentenyladenosine, 1-methyladenosine, 2-methyladenosine, N6-methyladenosine, 2-methylthio-N6-isopentenyladenosine; a cytidine motif in the polynucleotide sequence is substituted with a group independently selected at each site from 4-acetylcytidine, 2′-O-methylcytidine, 3-methylcytidine, 5-methylcytidine, methyl-cytosine, 2-thiocytidine; a uridine/thymidine motif in the polynucleotide sequence is substituted with a group independently selected at each site from 5-(carboxyhydroxymethyl) uridine, 5-carboxymethylaminomethyl-2-thiouridine, 5-carboxymethylaminomethyluridine, dihydrouridine, 2′-O-methylpseudouridine, 1-methylpseudouridine, 5-methylaminomethyluridine, 5-methoxyaminomethyl-2-thiouridine, 5-methoxycarbonylmethyl-2-thiouridine, 5-methoxycarbonylmethyluridine, 5-methoxyuridine, uridine-5-oxyacetic acid-methylester, uridine-5-oxyacetic acid, pseudouridine, 5-methyl-2-thiouridine, 2-thiouridine, 4-thiouridine, 5-methyluridine, 2′-O-methyl-5-methyluridine, 2′-O-methyluridine, 3-(3-amino-3-carboxy-propyl) uridine, (acp3)u. A good related resource is: Protocols for Oligonucleotides and Analogs. Synthesis and Properties, Agrawal, ed., Methods in Molecular Biology Vol. 20, Humana Press, Totowa, N.J.

[1402] As used herein, the terms “nucleic acid(s)” and “nucleotide sequence(s)” and “polynucleotide(s)” include polymeric form of nucleotides of any length, deoxyribonucleotides, ribonucleotides, DNA molecules (e.g. cDNA or genomic DNA), RNA molecules (e.g. mRNA), combinations of DNA and RNA molecules or hybrid DNA/RNA molecules, and analogs, derivatives and modifications (e.g. methylation) of DNA or RNA molecules. Analogs can be generated using, for example, nucleotide analogs, which include, but are not limited to, inosine or tritylated bases. Such analogs can also comprise DNA or RNA molecules comprising (or consisting of) modified backbones that lend beneficial attributes to the molecules such as, for example, nuclease resistance or an increased ability to cross cellular membranes. The nucleic acids or nucleotide sequences can be single-stranded (the sense or antisense strand), double-stranded, may contain both single-stranded and double-stranded portions, and may contain triple-stranded portions.

### Vector(s) Thereof of the Disclosure

[1403] In some embodiments, a vector/“expression vector” herein is a nucleotide sequence that contains at least one nucleotide sequence(s) of/in this disclosure, optionally a double-/single-stranded (or mixed) circular/linear (or mixed) DNA/RNA (or mixed), comprising at least one nucleotide sequence of/in this disclosure, optionally to be transferred into a host cell and/or into a unicellular/multicellular host organism, wherein the expression vector contains appropriate regulatory element(s), some non-limiting examples of which are given in U.S. Pat. No. 8,080,517B2 and/or [P14] (and references therein), to support the expression of said nucleotide sequence(s) of/in this disclosure inside a cell (preferably wherein the regulatory element(s) selected is tailored to the cell species/type in which the expression vector may be expressed). Appropriate cell lines or host systems may be chosen to ensure the desired modification and processing of a foreign peptide/protein is achieved. For example, peptide expression within a bacterial system can be used to produce a non-glycosylated core peptide; whereas expression within mammalian cells ensures “native’ glycosylation of a heterologous peptide. An introduction to this area is given by {for non-limiting example} Goeddel: Gene expression technology: Methods in Enzymology, Academic Press, San Diego, California; Sambrook et al.: Molecular cloning: a laboratory manual, Cold Spring Harbor Laboratory Press, Cold Spring Harbor, NY, USA; and Short Protocols in Molecular Biology (1999), John Wiley & Sons Inc, NJ, USA. Note that a strategy to maximize recombinant protein expression in E. coli is to express the protein in a host bacteria with an impaired capacity to proteolytically cleave the recombinant protein. Another strategy is to design the nucleic acid sequence of the nucleic acid to be inserted into an expression vector so that the individual codons for each amino acid are those preferentially utilized in E. coli (Wada et al., (1992) Nucleic Acids Res. 20:2111-2118) and/or use a Rosetta strain of E. coli, which expresses a variety of tRNAs that are normally found at low abundance in E. coli. Note that, in an alternative, a recombinant expression vector can be transcribed and translated in vitro, for example using T7 promoter regulatory sequences and T7 polymerase.

[1404] An expression vector comprising at least one DNA sequence of/in this disclosure operably linked to an expression control sequence; a cultured cell comprising this vector. A cultured cell comprising at least one DNA sequence of/in this disclosure operably linked to an expression control sequence; a method of making a peptide/protein of/in this disclosure comprising culturing the cell under conditions permitting expression of the aforementioned DNA sequence. A vector comprising a nucleotide sequence encoding at least one amino acid sequence of/in this disclosure. DNA comprising a sequence encoding at least one amino acid sequence of/in this disclosure, wherein the sequence is operably linked to a heterologous expression control sequence. At least one nucleotide sequence, preferably DNA, of/in this disclosure as part of a longer nucleotide sequence that comprises one or more of a “start” (translation initiating) codon, a “stop” (translation terminating) codon, termination sequence, gene expression control element(s), regulatory DNA sequence(s), promoter (constitutive or inducible, optionally tissue(s) specific), enhancer(s), inducer(s), transcription/translation termination sequence(s), ribosomal binding site(s), regulatory DNA sequence(s), leader sequence(s), 5′ and 3′ untranslated regions, 3′-UTR sequence that contains a polyadenylation sequence, transcriptional/translation control region(s), Kozak sequence, amplification marker(s)/reporter(s), antibiotic resistance gene(s), reporter gene(s), tag(s), fusion partner sequence(s) is componentry to this disclosure. At least one nucleotide sequence of/in this disclosure incorporated into a longer nucleotide sequence/genome/chromosome/vector/virus/plasmid/episome/expression vector/recombinant vector, optionally inside a host cell (e.g. in unicellular microorganism species or human/animal derived cell line or Embryonic Stem [ES] cell(s) or in one or more cells of a multicellular animal), is componentry to this disclosure. Optionally wherein the vector can be a nucleotide sequence that contains/comprises at least one nucleotide sequence of/in this disclosure. Optionally wherein the vector is/comprises at least one nucleotide sequence of/in this disclosure and one or more of a gene expression control element(s), promoter(s) (constitutive or inducible, optionally tissue(s) specific), enhancer(s), inducer(s), termination sequence(s), regulatory DNA sequence(s), antibiotic resistance gene(s), reporter gene(s), optionally wherein the vector is a virus (optionally a recombinant adeno-associated virus [AAV]) or plasmid, capable or incapable of replication inside a host cell, preferably wherein the vector in a host cell leads to the expression of one or more amino acid sequence embodiments of/in the disclosure in this host cell. Many applicable vectors are known to those of the art.

[1405] In some embodiments, the expression vector also expresses something that makes it “selectable” e.g. expresses a gene conferring antibiotic/drug/toxin resistance and/or confers ability to survive on a medium that the cell(s) wouldn't be able to if it didn't have, and wasn't expressing, the expression vector etc. A particular vector can be made with a particular target cell type(s)/population of cells/tissue(s) in mind. For example, particular regulatory elements, such as control elements and promoters, can be chosen based on the target cells, such that the regulatory elements are operable in the target cells.

### Cell(s) Thereof of the Disclosure

[1406] A nucleic acid expression construct (“expression vector”), optionally capable of autonomous replication, encoding at least one amino acid sequence(s) of/in this disclosure (e.g. a plasmid, virus, cosmid, phagemid etc.). A host cell(s) (e.g. [non-limiting] microoganism/prokaryote/eukaryote/bacteria/yeast/mammalian/insect/plant cell(s)/cell line/E. coli/Saccharomyces cerevisiae etc., optionally in vitrolin vivolex vivo) comprising this expression construct. A method for producing an amino acid sequence(s) of/in this disclosure comprising culturing this host cell(s), under conditions suitable for the expression of the amino acid sequence(s), and recovering said amino acid sequence(s) therefrom. Non-limiting methods are described in U.S. Pat. No. 5,906,923 (ATPASE INHIBITOR, Jennifer L. Hillman), herein incorporated in its entirety by reference. Other methods are known to those of the art e.g. refer to [P14], herein incorporated in its entirety by reference, and references therein.

[1407] Componentry to this disclosure is to produce an amino acid sequence(s) of/in this disclosure recombinantly.

[1408] A method comprising: (i) culturing a host cell comprising an expression vector comprising a nucleotide sequence encoding at least one amino acid sequence of/in this disclosure under conditions which provide for expression of said amino acid sequence(s), encoded by the expression vector within the host cell; and recovering the amino acid sequence(s), optionally by way of an epitope/affinity tag sequence component, optionally wherein this tag is then removed, optionally by the epitope/affinity tag sequence being connected to one end of the amino acid sequence(s), optionally the N-terminal end, by a cleavable linker sequence that is cleaved.

[1409] A process for the manufacture of at least one amino acid sequence of/in this disclosure by culturing a micro-organism that produces it in a nutrient medium.

[1410] An expression vector comprising a nucleotide sequence encoding at least one amino acid sequence of/in this disclosure. A transformant obtained by transforming a host with this expression vector. A method for manufacturing an amino acid sequence(s) of/in this disclosure, comprising culturing the transformant to produce it; and recovering the produced amino acid sequence(s) from its culture.

[1411] A cell line comprising (or consisting of) cells transfected with a polynucleotide comprising at least one nucleotide sequence of/in this disclosure.

[1412] A vector comprising a nucleotide sequence encoding at least one amino acid sequence on this disclosure.

[1413] A cell(s) transfected with a DNA/RNA encoding a polypeptide/peptide of/in this disclosure and expressing this polypeptide/peptide.

[1414] A cell of this disclosure fused with a different cell of this disclosure, and/or a cell not of this disclosure, is a cell of this disclosure.

### Transgenic Organism(s) Thereof of the Disclosure

[1415] A transgenic organism(s)/subject(s), optionally a non-human transgenic animal and/or a non-human transgenic mammal, optionally a microorganism, with one or more nucleotide sequences of/in this disclosure incorporated into one or more of their cells, optionally incorporated into the genome (nuclear and/or mitochondrial genome, preferably stably, if in mitochondria: codon usage is preferably optimized for mitochondrial variant, for that species, of genetic code) of one or more of their cells, optionally wherein the modified cells include germ cells, optionally wherein this subject is a test subject in a lifespan/healthspan/brainspan study. The transgenic subject can be a human or, in alternative embodiments, any organism, preferably an animal, that isn't human. In some embodiments it is a multicellular organism. In some embodiments it is a laboratory animal, such as (without limitation) a mouse (especially preferred) or rat or other rodent. In some embodiments it is a pet/companion animal, such as (without limitation) a dog or cat. In some embodiments it is a commercial/farm animal, such as (without limitation) a cow, pig or racehorse. In some embodiments it is a microorganism/unicellular organism, such as (without limitation) a yeast or bacterium. A transgenic non-human animal, preferably a transgenic non-human mammal, which comprises a gene/nucleotide sequence encoding at least one amino acid sequence of/in this disclosure stably integrated into its genome. Method of producing an animal, optionally a mammal, preferably a non-human mammal, optionally a mouse, with a longer healthspan and/or lifespan by introducing a vector(s) comprising at least one nucleotide sequence of/in this disclosure.

[1416] In some embodiments, a nucleotide sequence(s) of/in this disclosure is expressed in all the cells of the subject, optionally because it is under the control of (operably linked to) a constitutive promoter(s)/regulatory element(s). In other embodiments, a nucleotide sequence(s) of/in this disclosure is expressed in some of the cells of the subject, optionally delimited to cells of a particular cell type(s), tissue(s), organ(s), body part(s) etc., optionally because it is under the control of (operably linked to) a cell type(s)/tissue(s)/organ(s) specific promoter(s)/regulatory element(s). In some embodiments, a nucleotide sequence(s) of/in this disclosure is expressed in one or more cells of the subject only when it is induced to do so by an inducible promoter(s)/regulatory element(s). In some embodiments, a nucleotide sequence(s) of/in this disclosure is inheritable e.g. it can be found in one or more offspring of the subject, preferably who themselves can pass it on to one or more of their offspring.

[1417] In some embodiments, a nucleotide sequence(s) of/in this disclosure is “knocked-in” (optionally using homologous recombination) to their native IF1 gene, replacing part(s) or totality thereof. Optionally wherein the “knock-in” is an IF1 gene from a different, preferably bigger and/or longer living, species and/or wherein the “knock-in” is a mutated/variant IF1 gene with a modified “phosphorylation control switch” residue (replaced with an amino acid residue that cannot be phosphorylated) and/or an attenuated “pH dependence motif” (FIG. 10) and/or a truncated IF1 gene e.g. without a “pH dependence motif” (e.g. expressing only IF1 protein residues 14-47, using “mature” bovine numbering, and/or the equivalent/best aligned component of a different IF1 protein) and/or some other sequence change(s) mentioned herein and/or multiple (optionally different from one another) IF1 gene (and/or mutant(s)/variant(s) thereof) sequences are knocked in place of one, to increase the amount of IF1 protein expressed, and/or sequence change(s) is made to the promoter(s)/regulatory region(s) of the IF1 gene (and/or mutant(s)/variant(s) thereof) to increase its expression.

[1418] How to produce a transgenic organism is well known to those of the art e.g. refer to [P14] and references therein, including U.S. Pat. Nos. 5,675,060, 5,850,001, 5,792,902, 5,573,933, 5,633,076, 5,741,957, 5,827,690, 5,831,141, 5,849,992, 5,814,300, WO94/24301; Watson et al., Recombinant DNA, W.H. Freeman & Co., New York, NY; Hogan, et al., Manipulating the Mouse Embryo, Cold Spring Harbor Press, Cold Spring Harbor, NY; Jaenisch, Proc. Natl. Sci. U.S.A. 73:1260-1264, (1976); Soriano and Jaenisch, Cell 46:19-29, (1986); Jahner et al., Proc. Natl. Acad. Sci. U.S.A. 82:6927-6931(1985); Van der Putten et al., Proc. Natl. Acad. Sci. U.S.A. 82:6148-6152(1985); Stewart, et al., EMBO J. 6:383-388(1987); Jahner et al., Nature 298:623-628(1982); Jaenisch, Science 240:1468-1474 (1988); Teratocarcinomas and Embryonic Stem Cells. A Practical Approach, Robertson E J, ed., IRL Press, Oxford); Pinkert, Transgenic Animal Technology, a Laboratory Handbook, Academic Press Inc., San Diego.

[1419] For example, a nucleotide sequence(s) (and/or vector(s) thereof) of/in this disclosure can be introduced into one or more embryonic cells. For non-limiting example,
[1420] (1) in vitro, a nucleotide sequence(s) of/in this disclosure (and/or vector(s) thereof) can be injected into a zygote [fertilized egg, in most cases all ensuing cells will then carry this injected nucleotide sequence(s) of the disclosure—so the ensuing animal is NOT a mosaic/chimera, with some of its cells carrying and others not] (Brinster et al., Proc. Natl. Acad. Sci. U.S.A. 82:4438-4442, 1985); or
[1421] (2) in vitro, blastomeres/blastocoeles infected with a virus(s) (e.g. retrovirus, preferably replication-defective, but can still perform viral integration into the genome) carrying a nucleotide sequence(s) of/in this disclosure (tends to produce mosaic/chimera animals, but if the nucleotide sequence(s) of/in this disclosure gets into germ cells, offspring can be produced with it in all of their cells; infection of blastomeres is enhanced by enzymatic removal of the Zona pellucida); or
[1422] (3) in vitro, a nucleotide sequence(s) of/in this disclosure (and/or vector(s) thereof) can be introduced into one or more Embryonic Stem (ES) cells (ES cells are obtained from pre-implantation embryos that are cultured in vitro) which can be combined with an animal blastocyst, after which the ES cells colonize the embryo and contribute to the germline of the resulting animal, which is a mosaic/chimera animal, from which an offspring animal with the nucleotide sequence(s) in all of its cells can be produced.

[1423] By the teaching of this disclosure, a transgenic animal (e.g. mouse) that has more IF1 protein, and/or a more potent IF1 protein(s)/fragment(s) (and/or sequence variant(s) thereof) {at pH 8} in all its cells (e.g. IF1 protein from a bigger and/or longer living species), will have a longer lifespan and/or healthspan than an unmodified animal of the same species, IF the transgenic animal is reared at a conducive ambient temperature to its lesser endogenic heat production, and/or is afforded extra bodily insulation. In other embodiments, a transgenic animal has more IF1 protein, and/or a more potent IF1 protein(s)/fragment(s) (and/or sequence variant(s) thereof) {at pH 8} in some of its cells, optionally in only a specific cell type(s)/tissue(s)/organ(s)/body part(s)/region(s), optionally only in one or more cells of the brain, preferably increasing “brainspan”, wherein heat transfer from other body regions (especially via blood flow), which don't have the reduced endogenic heat production, makes up for the reduced endogenic heat production in this area, which means the cold tolerability of the animal is closer to wild-type than the aforementioned animal, which has all of its cells modified with a nucleotide sequence(s) of/in this disclosure.

[1424] A method wherein the lifespan and/or healthspan and/or brainspan of a transgenic organism of this disclosure is assayed in an assay(s) thereof.

### Pharmaceutical/Cosmetic Composition(s) Thereof

[1425] All possible stereoisomers, and mixtures of stereoisomers thereof, of SEQ ID NO:X (or fragment thereof, or concatenated fragments thereof) are contemplated;
[1426] a pharmaceutically/cosmetically acceptable salt, solvate, hydrate, prodrug, liposome, nanoparticle (e.g. lipid nanoparticle, LNP) or other vector of the art of SEQ ID NO:X (or fragment thereof, or concatenated fragments thereof);
[1427] a medicament or a pharmaceutical/dermopharmaceutical/cosmetic/topical/supplement composition comprising (or consisting of) at least one peptide/protein of SEQ ID NO:X (or fragment thereof, or concatenated fragments thereof), and/or at least one pharmaceutically/cosmetically acceptable salt, solvate, hydrate, prodrug, liposome, nanoparticle (e.g. lipid nanoparticle, LNP) or other vector of the art thereof, and/or one or more polynucleotides [and/or at least one pharmaceutically/cosmetically acceptable salt, solvate, hydrate, prodrug, liposome, nanoparticle (e.g. lipid nanoparticle, LNP) or other vector of the art thereof] coding by the genetic code for at least one of SEQ ID NO:X {or fragment thereof, or concatenated fragments thereof}, and/or vector(s)/gene therap(y/ies) thereof and/or cell(s)/transgenic organism(s) thereof,
   [1428] and use thereof (optionally for at least one use disclosed herein), optionally for the treatment/amelioration/prevention/reversal/combat/slowing/delaying of cancer and/or aging (e.g. for preventative/therapeutic/aesthetic utility) and/or one or more diseases/disorders/physiological processes (and/or one or more of its consequences), or an unwanted/undesirable aesthetic(s), specified herein; wherein X can be 1, or the number of sequences in the Sequence Listing component to this application, or any integer between 1 and the total number of sequences in the Sequence Listing component to this application

[1429] Optionally administered via a protein therapy administration route/protocol of the art e.g. as used for an enzyme replacement therapy (ERT) e.g. intravenous infusion of protein(s) and/or medicament/composition/solution thereof.

[1430] A pharmaceutical composition comprising (or consisting of) at least one amino acid and/or nucleotide sequence (or vector(s) thereof, optionally wherein the vector is a plasmid or virus {optionally a recombinant adeno-associated virus, AAV}) of/in this disclosure and at least one of a pharmaceutically-acceptable carrier(s), additive(s), diluent(s), excipient(s). A pharmaceutical composition comprising (or consisting of) at least one peptide/protein comprising (or consisting of) at least one amino acid sequence of/in this disclosure, in a partially/completely bicyclic form, and at least one of a pharmaceutically-acceptable carrier(s), additive(s), diluent(s). Use of at least one amino acid and/or nucleotide sequence (or vector(s) thereof, optionally wherein the vector is a plasmid or virus {optionally a recombinant adeno-associated virus, AAV}), and/or pharmaceutical composition thereof, of/in this disclosure for the manufacture of a medicament. Use of at least one amino acid and/or nucleotide sequence (or vector(s) thereof, optionally wherein the vector is a plasmid or virus {optionally a recombinant adeno-associated virus, AAV}), and/or pharmaceutical composition thereof, of/in this disclosure for the manufacture of a medicament for treating/ameliorating/preventing/combating a disease/disorder/condition/process mentioned herein. Herein, wherever “pharmaceutical composition” is referred to, in other embodiments, this is substituted with “cosmetic composition” or “supplement composition”.

### Gene Therapy/Therapies

[1431] Use of at least one nucleotide sequence and/or at least one vector(s) thereof, optionally wherein the vector is a plasmid or virus/viral vector {optionally a recombinant adeno-associated virus, AAV}, optionally with one or more operably linked regulatory elements (e.g. a promoter and/or similar), of/in this disclosure for gene therapy. The vector is preferably a viral vector used in the art of gene therapy. Optionally derived from one or more of a retrovirus, adenovirus, adeno-associated virus, papilloma/herpes/vaccinia virus. Any method(s) relating to gene therapy available within the art may be used in the practice of the present disclosure (see e.g. Goldspiel et al., (1993) Clin Pharm 12:488-505; Larrick et al, Gene Therapy, Elsevier, NY, 1991).

[1432] Appropriate viral vectors can be selected based on the route of administration and the target cell type(s)/cell population(s). For example, retroviruses are preferred if the target cell type/population is actively proliferating and other viruses, such as lentivirus, adeno-associated virus, adenoviruses, are preferred if the target cell type/population is not actively proliferating. Different viruses have different specificity for different cell types and populations. Thus, a virus, or plural thereof, that infects a targeted cell type or population of cells can be selected.

[1433] Componentry to this disclosure is any nucleic acid sequence(s) that codes for one or more amino acid sequences of/in this disclosure. In specific embodiments, at least one nucleic acid sequence(s) encoding one or more amino acid sequence embodiments of/in this disclosure is administered to a subject, optionally to treat and/or enhance the subject, by way of gene therapy. Any method(s) for gene therapy available in the art can be used according to the present disclosure. For general reviews of the methods of gene therapy, refer Goldspiel et al., 1993, Clinical Pharmacy 12:488-505; Wu and Wu, 1991, Biotherapy 3:87-95; Tolstoshev, 1993, Ann. Rev. Pharmacol. Toxicol. 32:573-596; Mulligan, Science 260:926-932 (1993); and Morgan and Anderson, 1993, Ann. Rev. Biochem. 62:191-217; May 1993, TIBTECH 11(5): 155-215. Methods known in the art of recombinant DNA technology can be used, some of which are described in Ausubel et al. (eds.), Current Protocols in Molecular Biology, John Wiley & Sons, NY (1993); and Kriegler, Gene Transfer and Expression, A Laboratory Manual, Stockton Press, NY (1990). In a preferred aspect, a pharmaceutical/cosmetic composition of this disclosure comprises at least one nucleic acid sequence, encoding at least one amino acid/peptide/protein sequence embodiment of/in this disclosure, in an expression vector, which (e.g. within a cell) expresses the nucleic acid sequence(s) into an amino acid/peptide/protein sequence(s) of/in this disclosure. Preferably such a nucleic acid sequence(s) has a promoter, optionally a heterologous promoter, operably linked to the protein coding region. Wherein said promoter is inducible or constitutive, and, optionally, tissue-specific. With an inducible promoter, expression of the nucleic acid sequence(s) is controllable by controlling the presence or absence of the appropriate inducer of transcription (non-limiting e.g. “Tet-Off” {transcription is inactive in presence of a tetracycline e.g. doxycycline or similar structure} and “Tet-On” {transcription is only active in presence of a tetracycline e.g. doxycycline or similar structure} expression systems). In particular embodiments, the nucleic acid sequence(s) used has the sequence coding for the therapeutic amino acid/peptide/protein sequence(s) embodiment, and optionally its regulatory region(s) {promoter(s) etc.}, flanked by regions that promote homologous recombination at a desired site in the genome, thus providing for intrachromosomal expression of the amino acid/protein sequence(s) encoding nucleic acid sequence(s) (Koller and Smithies, 1372718-2 72 1989, Proc. Natl. Acad. Sci. USA 86:8932-8935; Zijlstra et al., 1989, Nature 342:435 438). Delivery of the nucleic acid sequence(s) into a subject may be direct, by directly exposing the subject to the nucleic acid(s) or nucleic acid(s)-carrying vector, or indirect, wherein cells are transformed with the nucleic acid(s) in vitro, then transplanted into the subject: termed in vivo and ex vivo gene therapy respectively. In specific embodiments, a nucleic acid sequence(s) of/in this disclosure is incorporated into a nucleic acid expression vector(s) which is administered to the subject, and/or to a cell(s) to be administered to the subject, wherein one or more of the following scenarios are contemplated: nucleic acid sequence or vector thereof is introduced into one or more cells by direct injection of naked DNA or by use of microparticle bombardment (e.g., a gene gun; Biolistic, Dupont; Sanford et al., U.S. Pat. No. 4,945,050), expression vector(s) is a defective/attenuated retroviral or other viral vector (e.g. see U.S. Pat. No. 4,980,286), administration is by way of a matrix with in situ scaffolding in which the nucleic acid sequence(s) and/or vector(s) thereof is contained (e.g., European Patent No. EP0741785BI and U.S. Pat. No. 5,962,427), optionally wherein the nucleic acid sequence(s) and/or vector(s) thereof is, before administration, coated with lipids or cell-surface receptors or transfecting agents, encapsulated in liposomes, microparticles (Tice et al., U.S. Pat. No. 4,542,025), or microcapsules, or administered in linkage to a peptide(s) which is known to enter the cell/nucleus e.g. in linkage to a ligand(s) subject to receptor-mediated endocytosis (see, e.g., Wu and Wu, 1987, J. Biol. Chem. 262:4429-4432) (which can be used to target cell types specifically expressing the receptors). In some embodiments, nucleic acid-ligand complexes can be formed in which the ligand comprises a fusogenic viral peptide to disrupt endosomes, allowing the nucleic acid sequence to avoid lysosomal degradation. In yet another embodiment, the nucleic acid(s) can be targeted in vivo for cell specific uptake and expression, by targeting a specific receptor (see e.g. PCT Publication Nos: WO92/06180, WO92/22635, WO92/20316, WO93/14188, WO93/20221). Alternatively, the nucleic acid(s) can be introduced intracellularly and incorporated within host cell DNA for expression, by homologous recombination (Koller and Smithies, 1989, Proc. Nat). Acad. Sci. USA 86:8932-8935; and Zijlstra et al., 1989, Nature 342:435-438). In specific embodiments, at least one viral vector(s) that contains at least one nucleic acid sequence(s) of/in this disclosure is used. For example, a retroviral vector(s) can be used (see e.g. Miller et al., 1993, Meth. Enzymol. 217:581 599). These retroviral vectors contain the components necessary for the correct packaging of the viral genome and integration into the host cell DNA. More detail about retroviral vectors can be found in Boesen et al., 1994, Biotherapy 6:291-302, which describes the use of a retroviral vector to deliver the MDR1 gene to hematopoietic stem cells in order to make the stem cells more resistant to chemotherapy. Other references illustrating the use of retroviral vectors in gene therapy are: Clowes et al., 1994, J. Clin. Invest. 93:644-651; Klein et al., 1994, Blood 83:1467-1473; Salmons and Gunzberg, 1993, Human Gene Therapy 4:129-141; and Grossman and Wilson, 1993, Curr. Opin. in Genetics and Devel. 3:110-114. Adenoviruses are other viral vectors that can be used in gene therapy. Adenoviruses are especially attractive vehicles for delivering genes to respiratory epithelia. Adenoviruses naturally infect respiratory epithelia where they cause a mild disease. Other targets for adenovirus-based delivery systems are liver, the Central Nervous System (CNS), endothelial cells, and muscle. Adenoviruses have the advantage of being capable of infecting non-dividing cells. Kozarsky and Wilson, 1993, Current Opinion in Genetics and Development 3:499-503 present a review of adenovirus based gene therapy. Bout et al., 1994, Human Gene Therapy 5:3-10 demonstrated the use of adenovirus vectors to transfer genes to the respiratory epithelia of rhesus monkeys. Other instances of the use of adenoviruses in gene therapy can be found in Rosenfeld et al., 1991, Science 252:431-434; Rosenfeld et al., 1992, Cell 68:143-155; Mastrangeli et al., 1993, J. Clin. Invest. 91:225-234, PCT Publication WO94/12649; and Wang et al., 1995, Gene Therapy 2:775-783. Adeno-associated virus (AAV) is another option for use in gene therapy (Walsh et al., 1993, Proc. Soc. Exp. Biol. Med. 204:289-300; and U.S. Pat. No. 5,436,146). Another option is to use an ancestral AAV such as Anc80 (Zinn et al. 2015, Cell Reports, 12(6): 1056-68). A viral vector(s) can be provided as a pharmaceutical composition comprising at least one appropriate pharmaceutically acceptable carrier and/or excipient, with an appropriate dose for the appropriate route of administration and regime selected. Another approach to gene therapy involves transferring a nucleotide sequence(s)/gene(s) to cells (optionally sourced from the subject, optionally stem cells from the subject, e.g. refer US20140234275A1) in vitro, e.g. in tissue culture, by one or more such methods as electroporation, lipofection, calcium phosphate mediated transfection, or viral infection. Usually, the method of transfer includes the transfer of a selectable marker to the cells. The cells are then placed under selection to isolate those cells that have taken up and are expressing the transferred nucleotide sequence(s)/gene(s). Those cells are then delivered/returned to a subject. In an embodiment, the nucleic acid sequence(s) is introduced into a cell prior to administration in vivo of the resulting recombinant cell. Such introduction can be carried out by any method known in the art, including but not limited to transfection, electroporation, microinjection, infection with a viral or bacteriophage vector(s) containing the nucleic acid sequence(s), cell fusion, chromosome-mediated gene transfer, microcellmediated gene transfer, spheroplast 1372718-2 74 fusion, etc. Numerous techniques are known in the art for the introduction of foreign nucleotide sequences/genes into cells (see, e.g., Loeffler and Behr, 1993, Meth. Enzymol. 217:599-618; Cohen et al., 1993, Meth. Enzymol. 217:618-644; Clin. Pharma. Ther. 29:69-92(1985)) and any one or more of which may be used in accordance with the present disclosure. Preferably, in some embodiments, the used technique(s) should provide for the temporary or stable transfer of the nucleic acid sequence(s) to the cell, so that the nucleic acid sequence(s) is expressible by the cell and, optionally, heritable and expressible by its cell progeny. The resulting recombinant cells can be delivered to a subject by various methods known in the art. Recombinant blood cells (e.g., hematopoietic stem or progenitor cells) are preferably administered intravenously. The amount of cells envisioned for use depends on the desired effect, patient state, etc., and can be determined by one skilled in the art. Cells into which a nucleic acid sequence(s) can be introduced for purposes of gene therapy encompass any desired, available cell type, and include but are not limited to epithelial cells, endothelial cells, keratinocytes, fibroblasts, muscle cells, hepatocytes, blood cells such as T lymphocytes, B lymphocytes, natural killer (NK) cells, monocytes, macrophages, neutrophils, eosinophils, megakaryocytes, granulocytes, various stem or progenitor cells, in particular hematopoietic stem or progenitor cells, e.g., as obtained from bone marrow, umbilical cord blood, peripheral blood, fetel liver, etc. In a preferred embodiment, the cell used for gene therapy is autologous to the subject. In specific embodiments, stem or progenitor cells are used. Any stem and/or progenitor cells which can be isolated and maintained in vitro can potentially be used in accordance with this embodiment of the present disclosure (see e.g. PCT Publication No. WO94/08598; Stemple and Anderson, 1992, Cell 7 1:973-985; Rheinwald, 1980, Meth. Cell Bio. 21A: 229; and Pittelkow and Scott, 1986, Mayo Clinic Proc. 61:771).

[1434] At least one recombinant adeno-associated virus (AAV; e.g.: AAV1, AAV2, AAV4, AAV5, AAV8, AAV9, AAV-PHP.B, or AAVrh10; US20190358346A1, U.S. Pat. No. 8,865,881B2, WO2012142529A2, RU2020125073A, [237], patent applications/patents/papers that one or more of these cite, and/or that cite one or more of them), and/or self-complementary adeno-associated virus (scAAV), and/or other gene therapy vector(s) of the art (somatic and/or germline), optionally one invented/discovered by James Wilson and/or co-worker(s)/student(s)/affiliate(s)/compan (y/ies) (e.g. Regenxbio, Dimension Therapeutics, Passage Bio etc.), optionally/preferably one that has been used in a clinical trial(s), optionally a clinical trial listed on the clinicaltrials.gov website, preferably wherein it has passed Phase I clinical trials, for use as a medicament/therapeutic/cosmetic in a subject, optionally co-administered (before and/or concurrent and/or after) with an immunosuppressant/anti-inflammatory compound(s)/method(s)/prednisone, optionally wherein the AAV(s) and/or vector(s) persists for a period of time after administration, which can be permanent, as an episome(s)/extra-chromosomal genetic material in one or more cells of the subject, wherein any AAV subtype/serotype, including any modified/engineered/hybrid/pseudotyped derivative(s), is contemplated by, and componentry to, this disclosure, illustratively AAV2 and/or AAV8 and/or AAV9 [which can be administered, to illustrate, intravenously and can cross the blood-brain barrier in mice [238]], wherein AAV9 is used in Zolgensma, an FDA approved gene therapy), optionally wherein the vector is single stranded or a monomeric duplex vector, optionally wherein the AAV serotype(s) has greater affinity for a cell type(s) and/or cells of the nervous system, wherein the gene therapy vector comprises AAV capsid proteins (optionally of AAV serotype 5) and at least one nucleotide sequence(s) encoding at least one IF1 protein/fragment (or sequence variant thereof), and/or fusion protein(s) thereof, optionally at least one sequence of SEQ ID NO: X (or a fragment thereof, or concatenated fragments thereof, wherein X can be 1, or the number of sequences in the Sequence Listing component to this application, or any integer between 1 and the total number of sequences in the Sequence Listing component to this application), flanked by AAV Inverted Terminal Repeats (ITRs, optionally AAV2 ITRs), wherein the nucleotide sequence(s) of interest is operably linked to expression control element(s) comprising a promoter (and optionally a terminator sequence and/or a Woodchuck Hepatitis Virus [WHP] Posttranscriptional Regulatory Element [WPRE]) that produces expression in a cell(s), preferably an effective amount, of at least one peptide/protein/amino acid sequence(s) of/in this disclosure, preferably to obtain a therapeutic/aesthetic/desirable/cosmetic effect in the subject, wherein the promoter can be selected (without restriction) from the group consisting of. cytomegalovirus (CMV) promoter, phosphoglycerate kinase (PGK), b-globin, CBA, SV40, elFalpha, CAG promoter (a combination of the cytomegalovirus early enhancer element and chicken beta-actin promoter), artificial composite promotor (e.g. comprising CMV enhancer, chicken β-actin promoter, and MVM intron [PCBh]), glial fibrilary acidic protein (GFAP) promoter, synapsin-1 promoter, Neuron Specific Enolase (NSE), tissue specific promoters (e.g. Central Nervous System specific, e.g. neuron and/or glia specific), and inducible promoters such as a Tet-operon derived promoter, optionally wherein the gene therapy vector(s) is administered to the brain (one or more regions thereof e.g. (non-limiting) basal ganglia e.g. substantia nigra)/cerebrospinal fluid, optionally by lumber injection and/or injection into the cisterna magna and/or the eye (non-limiting e.g. intraretinal). A pharmaceutical composition comprising at least one AAV(s) described herein and at least one pharmaceutically acceptable excipient/carrier, optionally wherein the dose of the virus is in a range between 109 to 1020 genome copies (CG) per composition, administered systemically or locally, optionally wherein the administration route(s) circumnavigates the blood-brain barrier, optionally via the nasal route, and/or by intraventricular, intracerebral, intracisternal, intracerebroventricular, and/or intrathecal direct injection, among others. A plasmid(s) comprising the sequence of a recombinant AAV vector: an expression cassette flanked on either side by the ITRs of an AAV, wherein said expression cassette comprises a promoter, a coding region for at least one polynucleotide(s) of/in this disclosure, and optionally a terminator sequence. In other embodiments the viral vector(s) can be derived from adenovirus, retrovirus, lentivirus, herpes virus or other. Use of a vector(s) as herein defined for the manufacture of a medicament/pharmaceutical composition, optionally for the treatment/amelioration/prevention/reversal/combat of one or more diseases or disorders or physiological processes (and/or one or more of its consequences) or an unwanted/undesirable aesthetic(s) specified herein, for example, by a method comprising administering an effective amount of the vector(s), and/or pharmaceutical/cosmetic composition(s)/medicament thereof, to a subject in order to treat/improve/enhance the subject. Use of a vector(s) as herein defined, carrying at least one nucleotide sequence(s) encoding at least one IF1 protein/fragment (and/or sequence variant thereof), and/or fusion protein(s) thereof, in use as an oncolytic/anti-cancer virus is componentry to this disclosure, optionally wherein it is administered locally, rather than systemically, to the subject. Use of a vector(s) as herein defined, optionally AAV2, carrying at least one nucleotide sequence(s) encoding at least one IF1 protein/fragment (and/or sequence variant thereof), and/or fusion protein(s) thereof, to treat age-related macular degeneration (AMD) in a subject, optionally via local administration of the vector(s), and/or medicament/pharmaceutical composition thereof, to one or both eyes of the subject, optionally via intravitreal and/or sub-retinal administration. Dual, overlapping vector strategies (splitting the coding sequence over two or more vectors [237]) are componentry to this disclosure.

[1435] Liposomes, fusogenic liposomes, exosomes, nanocarriers, nanomotors, nanoparticle-stabilized nanocapsules (NPSCs), lipid preparations and lipid nanoparticles (LNPs) can also be used as vectors [239-241] in a composition/method of this disclosure. A variety of these types of vectors are known in the art (see, for example: U.S. Pat. No. 5,399,346; Bandara et al., DNA and Cell Biology, 11:227-231(1992); Berkner, Biotechniques 6:616-629(1989); U.S. Pat. No. 5,240,846 to Collins et al., issued Aug. 31, 1993; Culver and Blaese, TIG 5:171-178(1994); Goldman et al, Gene Therapy 3:811-818(1996); Hamada et al., Gynecologic Oncology 63:219-227(1996); Holmberg et al., J. Liposome Res. 1:393-406(1990); Hurford et al., Nature Genetics 10:430-435(1995); Karlsson et al., The EMBO J. 5:2377 2385(1986); Kleinerman et al., Cancer Res. 55:2831-2836(1995); Krul et al., Cancer Immunol. Immunother. 43:44-48(1996); U.S. Pat. No. 5,532,220 to Lee et al., issued Jul. 2, 1996; Liu et al., Nature Biotechnology 15:167-173 (1997); Mathiowitz et al., Nature 386:410- (1997); Nabel et al. Proc. Natl. Acad. Sci. USA 90:11307-11311(1993); Nabel et al., Science, 14 September: 1285-1288(1990); Ram et al., Cancer Res. 53:83-88(1993); Rosenfeld et al., Cell 68:143-155(1992); U.S. Pat. No. 5,580,859 to Felgner et al., issued Dec. 30, 1997 WO 98/13353 to Whitney et al., published Apr. 2, 1998; U.S. Pat. No. 5,298,429 to Evans et al., issued Mar. 29, 1994; U.S. Pat. No. 5,514,561 to Quante et al., issued May 7, 1996; WO96/24301 to The University of Edinburgh, published Oct. 27, 1994; WO96/30540 to The Regents of the University of California, published Oct. 3, 1996; Larrick and Burck, Gene Therapy, Application of Molecular Biology, Elsevier, NY (1991); and Pinkert, Transgenic Animal Technology, a Laboratory Handbook, Academic Press, Inc., San Diego.

[1436] A gene therapy construct can also be a naked DNA construct such as a plasmid(s), which is useful in a gene therapy treatment system (see, for example, U.S. Pat. No. 5,580,859 to Felgner et al., issued Dec. 3, 1996; U.S. Pat. No. 5,703,055 to Felgner et al., issued Dec. 30, 1997; U.S. Pat. No. 5,846,946 to Huebner et al., issued Dec. 8, 1998; and U.S. Pat. No. 5,910,488 to Nabel et al., issued Jun. 8, 1999), wherein this option is herein contemplated.

mRNA(s) and LNP(s)

[1437] Combination of at least one mRNA sequence of/in this disclosure (optionally incorporating one or more, independently selected, non-typical nucleosides e.g. pseudouridine or 1-methyl pseudouridine instead of uridine, and/or methyl-cytosine instead of cytosine, at one or more mRNA sequence positions) and one or more lipid nanoparticles (LNPs), optionally wherein the LNPs used are as disclosed in a patent application/patent filed by (and/or assigned to) one or more of Moderna Therapeutics Inc. (e.g. refer https://patents.google.com/?assignee=Moderna+Therapeutics), Arbutus Biopharma Corporation, Acuitas Therapeutics, Cure Vac, BioNTech, Alnylam Pharmaceuticals Inc., Arrowhead Pharmaceuticals or similar company, optionally one or more of U.S. Pat. Nos. 9,404,127, 9,364,435, 8,058,069 (and/or a reference(s) therein), optionally as used in a clinically utilized coronavirus vaccine e.g. that developed by Moderna Therapeutics Inc. for COVID-19 (mRNA-1273), e.g. as disclosed in one or more of U.S. Pat. Nos. 10,703,789, 10,702,600, 10,577,403, 10,442,756, 10,266,485, 10,064,959, 9,868,692. Some background reading: Moss et al. (2019) “Lipid Nanoparticles for Delivery of Therapeutic RNA Oligonucleotides” Mol. Pharmaceutics 16(6): 2265-2277, Kowalski et al. (2019) “Delivering the messenger: advances in technologies for therapeutic mRNA delivery”. Molecular Therapy. 27(4): 710-728, and references therein.

“Tet-Off” and “Tet-On” Inducible Gene Expression Embodiments of this Disclosure

[1438] In a “Tet-Off′ system, gene expression is under the control of a tetracycline-responsive promoter element (TRE), which permits gene expression if the tetracycline-controlled transactivator protein (tTA) binds, wherein tTA binding is blocked by the presence of tetracycline or doxycycline or similar compound structure. In a “Tet-On” system, gene expression is under the control of a tetracycline-responsive promoter element (TRE), which permits gene expression if the reverse tetracycline-controlled transactivator (rtTA) binds, wherein rtTA binding is enabled and conditional upon the presence of tetracycline or doxycycline or similar compound structure. So, one can transfer a gene into an organism under the control of a TRE promoter, and then control this gene's expression, spatially and/or temporally, by (1) controlling whether tTA or rtTA is expressed (which is set by which of these genes is also gene transferred into the organism) and (2) whether a tetracycline type compound structure is present or absent (set by compound administration or lack thereof). For example, generated transgenic mice with a transgenic gene encoding a mutant human IF1 protein (with a histidine in its “pH dependence motif” {refer FIG. 10} substituted with lysine) under the control of a TRE promotor. Furthermore, these mice had another exogenous gene present, for tTA protein expression, but which was only expressed in its forebrain neurons, and thence the mutant human IF1 gene was only expressed in forebrain neurons (wherein this expression is dependent on absence of tetracycline or similar structure). doesn't specify the ambient temperature these mice were housed at. With this omission, I presume normal room temperature, which is typically in the range 20-25° C. is an illustrative example of how an IF1 gene copy, or a mutant thereof, from the same or different species, can be transferred into an organism in order to increase its IF1 protein expression. This example shows it is safe in mouse brain (more specifically neurons in forebrain [131], is incorrect to refer to whole brain as it does) to increase IF1 protein content by three times, wherein the delta increase in [IF1 protein] occurs with a mutant human IF1 protein form with increased inhibitory potency against F₁F₀ ATP hydrolysis at pH 8, which in reduces F₁F₀ ATP hydrolysis capability by ˜35%, which demonstrates the safety of inhibiting F₁F₀ ATP hydrolysis in vivo, at least specifically in forebrain neurons (mice were “normal in appearance, home-cage behavior, reproduction, and longevity up to 1-year follow-up”). For more data and analysis on this herein, refer FIG. 6 and legend, and then FIGS. 7 and 8 and their legends. In alternative embodiments, tTA is expressed in all the tissues of the mouse, not just the brain (or part(s) thereof), and this mouse, and others like it, are entered into a lifespan study. These mice will have a longer health- and/or life-span than control mice (control mice optionally have the transgene for tTA but not the transgene for mutant IF1 mutant protein, or are the same genetically but are administered doxycycline, or other tetracycline, so that they don't express the extra, mutant IF1 protein gene), especially if the mice are kept at 37° C.

Further “Tet-Off” Embodiments of this Disclosure

[1439] A disclosure embodiment is for at least one transgenic IF1 protein/fragment (or sequence variant thereof) coding nucleotide sequence (herein often referred to as an “IF1 gene” for shorthand), optionally with a nucleotide change(s) that causes at least one amino acid change at the “phosphorylation control switch” residue and/or the “pH dependence motif” in the IF1 protein coded for (these IF1 protein elements are defined in FIG. 10), to be expressed only, or only substantially, or disproportionally, or more, in one or more of a specific cell type/tissue/organ/area of a subject, optionally wherein this selective IF1 protein/fragment (or sequence variant thereof) expression reduces F₁F₀ ATP hydrolysis and slows the metabolic/aging rate in this sub-section(s) of the subject, wherein this sub-section(s) generates less metabolic heat, but this is substituted for by heat transfer from surrounding body areas. For illustrative example, by making a transgenic mouse that expresses TA specifically in a certain mouse body tissue, by putting tTA expression under the control of a tissue specific promoter, wherein this tissue specific expression of tTA then drives tissue specific expression of at least one introduced IF1 gene (encoding at least one IF1 protein/fragment or sequence variant thereof) whose expression is under the control of a tetracycline-responsive promoter element (TRE). For non-limiting example, putting tTA expression under the control of a dopamine neuron specific promoter such as that for tyrosine hydroxylase (the first and rate-limiting enzyme for dopamine synthesis) [242], or the dopamine transporter (DAT, required for dopamine re-uptake into dopaminergic neurons) [243-244], or Pitx3 (transcription factor involved in dopaminergic neuron differentiation), or D1A dopamine receptor subtype, which then drives specific expression of at least one IF1 gene (encoding at least one IF1 protein/fragment or sequence variant thereof) in dopaminergic neurons, wherein this IF1 gene(s) is under the control of a tetracycline-responsive promoter element (TRE). Greater IF1 protein expression in dopaminergic neurons reduces their F₁F₀ ATP hydrolysis, especially if the extra IF1 protein has an amino acid residue that cannot be phosphorylated (optionally alanine) at its “phosphorylation control switch” position and/or a H49K (or H49A or H49R) substitution (position 49 using “mature” {Mitochondrial Import Sequence [MIS] cleaved off} human IF1 protein numbering) in its “pH dependence motif”, which slows the metabolic/aging rate in dopaminergic neurons, which reduces the subject's risk/progression of Parkinson's disease, wherein these dopaminergic neurons generate less metabolic heat, but this is substituted for by heat transfer from surrounding body areas, such that the dopaminergic neurons are maintained at normal body temperature.

[1440] A useful control is that this subject, when administered (e.g. in drinking water) with tetracycline, has the same risk/progression of Parkinson's disease as a control subject without these genetic manipulations (which are, to recap, addition of tTA gene, under dopaminergic neuron specific promoter, and addition of at least one IF1 gene, encoding at least one IF1 protein/fragment or sequence variant thereof, under the control of a tetracycline-responsive promoter element, TRE). In a different embodiment, tTA expression is put under the control of a photoreceptor specific promoter, such as that for rhodopsin (or other opsin), which then drives specific expression of at least one introduced IF1 gene, encoding at least one IF1 protein/fragment or sequence variant thereof, in photoreceptors, wherein this IF1 gene(s) is under the control of a tetracycline-responsive promoter element (TRE). Greater IF1 protein expression in photoreceptors reduces their F₁F₀ ATP hydrolysis, especially if the extra IF1 protein has an amino acid residue that cannot be phosphorylated (optionally alanine) at its “phosphorylation control switch” position and/or a H49K (or H49A or H49R) substitution (position 49 using “mature” {after MIS cleaved off} human IF1 protein numbering) in its “pH dependence motif”, which slows the metabolic/aging rate in photoreceptors, which reduces the subject's risk/progression of aging related/correlated eye disease(s), optionally Age-related Macular Degeneration (AMD), wherein these photoreceptors generate less metabolic heat, but this is substituted for by heat transfer from surrounding body areas, such that the photoreceptors are maintained at normal body temperature.

[1441] In a disclosure embodiment, the experiment of is repeated but with the mutant IF1 protein transgene expressed in a different part(s) of the mouse. So, instead of using B16-Tg(Camk2a-tTa)1Mmay/J mice, which express tTA in forebrain neurons, as used, a different transgenic mouse type can be used, which expresses tTA in a different part(s) of the mouse body, which drives extra/mutant IF1 protein expression in that different part of the mouse body. Illustratively, a variety of transgenic mice that express tTA in different body areas/tissues/organs are available to those of the art, e.g. refer to a database of such mice at [245], and a number are commercially available, for illustrative example from The Jackson Laboratory (USA). Wherein (stock numbers given are for The Jackson Laboratory), for non-limiting example, B6.Cg-Tg(GFAP-tTA)110Pop/J mouse (stock No: 005964) has tTA expression driven by the human glial fibrillary acidic protein (GFAP) promoter and expresses tTA in astrocytes, B6.Cg-Tg(Sirpa-(TA)AUmri/J mouse (stock No: 023970) has tTA expression driven by mouse signal-regulatory protein alpha (Sirpa) promoter and expresses tTA in dentate granule cells of the hippocampus, B6.Cg-Tg(Scg2-(TA)1Jt/J mouse (stock No: 008284) has tTA expression driven by mouse secretogranin II promoter and expresses tTA in the brain, especially the suprachiasmatic nucleus, B6.Cg-Tg(Eno2tTA)5030Nes/J mouse (stock No: 003763) has tTA expression driven by rat neuron-specific enolase (Eno2) promoter and expresses tTA at high levels in the striatum and to a lesser extent in the cerebral cortex and hippocampus, B6;C3-Tg(NEFH-tTA)8Vle/J mouse (stock No: 025397) has tTA expression driven by human neurofilament heavy polypeptide (NEFH) promoter and expresses tTA in neurons and large-caliber axons of the brain and spinal cord, B6;129S-Slc6a3tm4.1(tTA)Xz/J mouse (stock No: 027178) has tTA expression driven by mouse Slc6a3 (solute carrier family 6, neurotransmitter transporter, dopamine, DAT) promoter and expresses tTA in dopamine neurons, NOD.Cg-Tg(Ins2-tTA)1Doi/DoiJ mouse (stock No: 004937) has tTA expression driven by rat insulin promoter (Ins2, commonly designated RIP) and expresses tTA in pancreatic beta cells, FVB.Cg-Tg(Myh6-tTA)6Smbf/J mouse (stock No: 003170) has tTA driven by rat alpha myosin heavy chain promoter and expresses tTA in cardiac myocytes. Many other such mice are commercially available, and/or are known to those of the art (e.g. from the literature) and other such mice, with tTA (and/or rtTA) specifically expressed in other cell type(s)/tissue(s)/organ(s), can be generated using techniques of the art, wherein how to apply these techniques to other mammal species is known to those of the art.

[1442] A disclosure embodiment is for at least one IF1 gene, encoding at least one IF1 protein/fragment or sequence variant thereof, optionally with a nucleotide change(s) that causes an amino acid residue change(s) at the “phosphorylation control switch” and/or the “pH dependence motif” (these IF1 elements are defined in FIG. 10) in the IF1 protein/fragment coded for, to be expressed ubiquitously in a subject, in every tissue. For illustrative example, by making a transgenic mouse that expresses tTA ubiquitously, by putting tTA expression under the control of a ubiquitous (e.g. promoter for actin gene) or synthetic (e.g. CAG promoter [246]) promoter, wherein this ubiquitous expression of tTA can then drive ubiquitous expression of an introduced IF1 gene(s), encoding at least one IF1 protein/fragment or sequence variant thereof, whose expression is under the control of a tetracycline-responsive promoter element (TRE).

More Direct IF1 Genetic Manipulations of this Disclosure

[1443] Some embodiments are to render localized or ubiquitous expression of at least one extra IF1 gene(s), encoding at least one IF1 protein/fragment or sequence variant thereof, in a subject without using TRE and tTA or rtTA. So, to illustrate, and not restrict, to render tissue-specific (extra) IF1 protein/fragment (or sequence variant thereof) expression in a subject by administering at least one IF1 gene(s), encoding at least one IF1 protein/fragment or sequence variant thereof, locally (rather than systemically) and/or under the control of a tissue specific promoter or, alternatively, rendering ubiquitous (extra) IF1 protein/fragment (or sequence variant thereof) expression in a subject by introducing at least one IF1 gene(s), encoding at least one IF1 protein/fragment or sequence variant thereof, under the control of a ubiquitous promoter, optionally a synthetic promoter. Without restriction, there are two possible options: (1) the introduced IF1 gene(s), encoding at least one IF1 protein/fragment or sequence variant thereof, under the control of an introduced promoter (and/or enhancer and/or other regulatory element[s]), is introduced into the subject, or (2) the IF1 gene(s) only, encoding at least one IF1 protein/fragment or sequence variant thereof, is introduced into the subject, wherein it inserts into the genome at a place that renders its expression under the control of a cell/tissue/organ/cell-type specific or ubiquitous promoter already in the genome. The IF1 gene(s), encoding at least one IF1 protein/fragment or sequence variant thereof, can be introduced into one or more cells of the subject, somatic and/or germline cell(s) thereof, in vivo or ex vivo (the latter wherein cell(s) are removed from the subject, and at least one IF1 gene, encoding at least one IF1 protein/fragment or sequence variant thereof, is introduced into the cell(s), and the cell(s) are returned back into the subject afterwards), wherein optionally the introduced nucleotide sequence(s), which includes at least one IF1 gene(s) encoding at least one IF1 protein/fragment or sequence variant thereof, is introduced as naked nucleotide material (optionally, without restriction, by one or more of heat shock, cell squeezing, using calcium phosphate to bind the DNA, electroporation, gene gun, sonoporation, photoporation, magnetofection, magnet assisted transfection, lipofection, impalefection, optical transfection, nucleofection, protofection, hydroporation, hydrodynamic delivery, microinjection {DNA is injected through the cell's nuclear envelope directly into the nucleus}, pronuclear injection {after the sperm enters the egg, but before the genetic material of the sperm and egg fuse, genetic material is injected into the pronucleus of either the sperm or egg, when these pronuclei become visible, which is the first sign of successful fertilization; this oocyte is then implanted in the oviduct of a pseudopregnant female [e.g. induced when female is bred by an infertile male], the offspring thence carry the genetic modification}, embryonic Stem Cell-Mediated Gene Transfer {gene is transfected into an embryonic stem cell(s) that is then inserted into a subject blastocyst(s), which is then implanted into foster mother, resulting offspring is/are chimeric, further mating can produce mice fully transgenic subject(s) with the gene of interest}) or in a vector(s), wherein the vector(s) can be, without restriction, one or more of a plasmid, episome, lipoplex (optionally with cationic lipids), liposome, cationic liposome, liposome coated in a polymer called polyethylene glycol, polymersome (synthetic liposome, made of amphiphilic block copolymers; copolymer is a polymer derived from more than one species of monomer), lipid nanoparticle (LNP, non-limiting e.g. as used for an FDA/EMA approved RNA/RNAi therapy), non-liposomal lipid formulation, polyplex (complex of polymer with DNA), polymer, polyamine, polyethylenimine, dendrimer (highly branched macromolecule with a spherical shape), inorganic nanoparticle (e.g. gold, silica, iron oxide, calcium phosphate etc.), organic nanoparticle, fugene, Fugene 6, Cell Penetrating Peptide (CPP), virosome (viral envelope {phospholipid membrane and surface glycoproteins} of a virus that, instead of viral genetic material, contains at least one therapeutic agent of/in this disclosure e.g. at least one nucleotide sequence of/in this disclosure), virus/recombinant virus (replication-competent, or replication-defective/attenuated {coding region(s) for gene(s) necessary for virion replication/packaging is replaced with other gene(s), corrupted or deleted}), retrovirus (has a single stranded RNA genome that codes for a reverse transcriptase enzyme that produces a double stranded DNA sequence that is inserted into host genome by viral enzyme integrase; most retroviruses can only insert into actively dividing cells, which makes them appropriate for delivering at least one IF1 gene(s), encoding at least one IF1 protein/fragment or sequence variant thereof, for anti-cancer therapy; however, they tend to insert into the genome unpredictably, so “insertional mutagenesis” is a concern, however, in an embodiment, sequence(s) is incorporated that directs a retroviral coded DNA sequence(s) to be inserted at a specific locus or loci in the genome e.g. utilizing the beta-globin locus control region and/or by inserting a sequence for a zinc finger nuclease which cuts the genome at a place that the viral DNA is desired to be inserted; retroviral vector particles with tropism for various target cells have been designed in the art), lentivirus (a genus of retrovirus; can insert into non-dividing cells; HIV is an example; enhancers can be used to improve transduction efficiency such as, without limitation, polybrene, protamine sulfate, retronectin, and DEAE Dextran), gammaretrovirus (a genus of retrovirus; non-limiting e.g. moloney retrovirus), adenovirus (doesn't integrate into genome, exists as an episome/extra-chromasomal DNA, not replicated during cell division, so is diluted by cell divisions and so is better used for non-dividing cells), adeno-associated virus (AAV; single stranded DNA virus {becomes double stranded in the cell}; can be integrated into genome, mostly at a known site in humans {designated AAVS1, in human chromosome 19}, but is more likely to remain episomal {replicating without incorporation into the chromosome}; in use as gene therapy vector the low integrative probability can be reduced further by removing its integrative capacity by removal of the rep and cap open reading frame sequences (each containing a number of overlapping genes) from the DNA of the vector, wherein these are replaced with the desired gene(s), together with a promoter to drive transcription of the gene(s) (and optionally a terminator sequence), which is inserted between the inverted terminal repeats (ITR); useful for dividing and non-dividing cells; doesn't cause any disease that we know of; can't replicate without a helper virus (e.g. adenovirus, thence its adeno-associated virus name) but recombinant AAV forms are available that can replicate without a helper virus; AAV has been used as gene therapy vector in clinical trials e.g. for retinal gene therapy by subretinal and/or intravitreal injection {e.g. Voretigene neparvovec (Luxturna)}, wherein a disclosure embodiment is to deliver at least one IF1 gene(s), encoding at least one IF1 protein/fragment or sequence variant thereof, similarly to treat/ameliorate/prevent/combat an aging-related/linked/correlated eye(s) disease/condition, optionally Age-related Macular Degeneration, AMD; all AAV serotypes are [contemplated by/componentry to] the present disclosure (AAV2 is the most well studied in humans; most AAV serotypes show neuronal tropism (amongst other tropisms), while AAV5 also transduces astrocytes) as are hybrid AAVs (e.g. genome components of one AAV, capsid of another e.g. AAV2/5, e.g. hybrid capsid from different strains, which can broaden tropism e.g. AAV-DJ has hybrid capsid of 8 different strains and so has broader tropism than ony one of these strains) and pseudotyped AAVs e.g. pseudotyped to modify their tropism [the cell type(s) that they infect] and/or to reduce immune reaction), self-complementary adeno-associated virus (scAAV; viral vector engineered from the naturally occurring adeno-associated virus (AAV); double stranded DNA virus), pseudotyped viruses (in which the endogenous viral envelope proteins have been replaced by either envelope proteins from other viruses, or by chimeric proteins, e.g. to alter the cell type(s) that the virus infects [tropism]; frequently used is glycoprotein G of vesicular stomatitis virus (VSV), short VSV-G, an envelope protein that transduces to all cell types), hybrid vector (=genetically engineered virus, to have desired vector characteristics e.g. to have qualities of more than one vector), replication-deficient Herpes simplex virus (human neurotropic virus, infects neurons, good for delivering gene(s) to nervous system), papilloma virus or other type of virus vector used in gene therapy systems or genetic manipulation of cells, or other vectors of the art, Cell Penetrating Peptide (e.g. protein transduction domain of Tat protein of HIV-1 virus) etc. This list is not exhaustive, other methods of introducing new genetic material to a subject are known to those of the art. Including using an ancestral or ancestral like AAV, such as Anc80 [247], which has significant merit because it doesn't stimulate immune reactions, because modern organisms haven't encountered this virus for generations. In some disclosure embodiments at least one IF1 gene, encoding at least one IF1 protein/fragment or sequence variant thereof, is introduced into the mitochondrial genome (protofection). In some disclosure embodiments, a composition/method/route herein described for use with at least one IF1 gene, encoding at least one IF1 protein/fragment or sequence variant thereof, is used with corresponding mRNA instead or in addition. Componentry to this disclosure is a combination of vectors, for example, to illustrate and not restrict, a virus vector inside of a liposome or a plasmid vector inside of a lipid nanoparticle. Naked DNA/RNA sequence(s) of/in this disclosure, and/or vector(s) thereof, may be complexed or covalently or noncovalently conjugated or bound to other molecules such as, to illustrate and not restrict, cationic lipids, packaged within liposomes, incorporated into hydrogels, cyclodextrins, biodegradable nanocapsules, or bioadhesive microspheres. Small molecules such as folate may be conjugated to nucleic acid molecules to enhance transport across the blood-brain barrier (Wu, D. et al. (1999) Pharm. Res. 16:415-19.).

[1444] A gene therapy construct(s) may be delivered to a subject in cells. Cells containing gene therapy constructs may be derived from the subject and/or another subject of the same or different species. Gene therapy construct(s) may be introduced into these cells ex vivo by, to illustrate and not restrict, viral transfection, electroporation, membrane fusion with liposomes, high velocity bombardment with DNA coated microprojectiles, incubation with calcium-phosphate-DNA precipitate, transfection with DEAE-dextran, direct microinjection, or other method(s) known in the art. These cells are then delivered to the subject by any of a variety of means, including implantation or injection. The cells may express the gene therapy construct in vivo to obtain therapeutic effect(s) in the subject. Alternatively, or in addition, after introduction into the subject, the cells containing the gene therapy construct(s) may replicate and/or package the gene therapy construct(s) such that endogenous cells in the patient may be infected, transformed, or transfected with the gene therapy construct(s) and thereby express it. Cells containing gene therapy construct(s) may be enclosed in structures composed of polymers or other materials to retain them at the instillation site(s) or to protect them from the subject's cellular immunity mechanisms. To guide without limitation, for cells containing viral expression construct(s), about 105 to about 10⁸ cells may be delivered to an appropriate site of the subject, but wherein the skilled practitioner is able to determine the most appropriate dose.

### Gene Editing

[1445] Componentry to this disclosure is to use gene/genome editing with engineered nuclease(s) and/or CRISPR/Cas9 and/or CRISPR/Cpf1 and/or Zinc finger nuclease(s) and/or Zinc-finger nickase(s) and/or Transcription activator-like effector nuclease(s) (TALEN) and/or meganuclease(s) and/or megaTAL(s) and/or homing endonuclease(s) and/or restriction enzyme(s) and/or endonuclease and/or nuclease(s) and/or “gene targeting” (in particular “gene knock-in”, replacement strategy based on homologous recombination) and/or Recombinant AAV mediated genome engineering (rAAV) and/or Multiplex Automated Genomic Engineering (MAGE) and/or Cre-Lox system(s) and/or Flp-FRT system(s) and/or similar and/or other genetic editing/engineering technology to edit a native IF1 gene in a subject to become a different IF1 gene of/in this disclosure, optionally with a nucleotide change(s) that causes an amino acid residue change(s) at the “phosphorylation control switch” (optionally serine to alanine substitution) and/or the “pH dependence motif” (optionally a H49K [or H49A or H49R] substitution at position 49, using “mature” {MIS cleaved off} human IF1 protein numbering) in the IF1 protein coded for (these IF1 protein elements are defined in FIG. 10), and/or to insert at least one nucleotide sequence(s) of/in this disclosure, which is a nucleotide sequence(s) that codes for one or more of the IF1 protein/fragment (or sequence variant thereof) sequence embodiments of/in this disclosure, into a genome, optionally in one or more cells of a subject, optionally one or more of a somatic cell(s), germline cell(s), gamete(s) (e.g. sperm[s] or egg[s]), gametocyte(s), spermatocyte(s), oocyte(s), fertilized egg(s), pronuclear fertilized egg(s), embryonic stem cell(s), induced pluripotent stem cell (IPSC), or other(s). Componentry to this disclosure is to “knock-in”, wherein this term is well understood in the art (e.g. one of the art is very familiar with “knock-out” and “knock in” mice, and protocols used), an IF1 protein/fragment (or sequence variant thereof) coding nucleotide DNA sequence of/in this disclosure, optionally with a nucleotide change(s) that causes an amino acid residue change(s) at the “phosphorylation control switch” (optionally serine to alanine substitution) and/or the “pH dependence motif” (optionally a H49K [or H49A or H49R] substitution at position 49, using “mature” {MIS cleaved off} human IF1 protein numbering) in the IF1 protein coded for (these IF1 elements are defined in FIG. 10), in place of the native IF1 gene of the subject.

### Manipulating IF1 Gene Expression

[1446] An embodiment is to manipulate/change the promoter/enhancer/repressor/regulatory sequence(s) of an IF1 gene(s), to increase the expression of IF1 protein, in somatic and/or germline cell(s) of a subject, optionally wherein a new promoter/enhancer/regulatory sequence(s) is added/substituted in, optionally wherein this increased IF1 protein expression reduces F₁F₀ ATP hydrolysis and slows the metabolic/aging rate in this cell(s) of the subject, optionally wherein exogenous/ambient heat is administered to the subject to substitute for this lesser heat generation and/or greater body insulation (e.g. clothing) is administered to the subject to reduce heat loss per unit time, which correspondingly keeps the subject warm despite lesser heat generation.

Summary/Overview/Recap of IF1 Genetic Manipulations of this Disclosure

[1447] An embodiment of this disclosure is to change the sequence of a subject's IF1 gene, optionally conferring a greater inhibitory potency against F₁F₀ ATP hydrolysis at normal mitochondrial matrix pH 8, and/or increase the amount of IF1 protein in a cell(s) of a subject, optionally in all or the majority of cells in the subject or a subset of cell type(s) and/or cell(s) in certain tissue(s)/area(s) of the subject, optionally wherein change in the amount of IF1 protein is effected by (1) altering the regulatory sequence(s) of the subject's IF1 gene to effect greater IF1 gene expression, by greater transcription and/or translation, and/or (2) by adding another IF1 gene(s) to the subject's cell(s) genome, optionally wherein one or more of the added IF1 gene(s) are from a different (larger and/or longer living {greater maximal lifespan}) species and/or is a mutant IF1 gene, optionally producing an IF1 protein/fragment or sequence variant thereof with a greater inhibitory potency against F₁F₀ ATP hydrolysis at normal mitochondrial matrix pH 8, optionally with a nucleotide change(s) that causes an amino acid residue change(s) at the “phosphorylation control switch” (optionally serine to alanine substitution) and/or the “pH dependence motif” (optionally a H49K [or H49A or H49R] substitution at position 49, using “mature” {MIS cleaved off} human IF1 protein numbering) in the IF1 protein coded for (these IF1 protein elements are defined in FIG. 10), optionally, especially if many/all of the subject's cells have been manipulated in this way, greater exogenous/ambient heat is administered to the subject to substitute for lesser endogenous heat generation and/or greater body insulation (e.g. clothing) is administered to the subject to reduce heat loss per unit time, which correspondingly keeps the subject warm despite lesser metabolic rate/body heat generation.

### Example Embodiments: IF1 Gene Therapy for Parkinson's Disease

[1448] Firstly, gene therapy is now well established in the clinic, with thousands of clinical trials having taken place, with more being conducted, across dozens of countries for many indications, with notable approvals [248]. Secondly, for closer context, there are numerous reviews of gene therapy for Parkinson's disease in the literature e.g. [249-252]. A disclosure embodiment is to locally deliver, optionally bilaterally, optionally by injection into the subject's putamen (as used in [253]) and/or into the subject's basal ganglia/substantia nigra (SN)/substantia nigra pars compacta (SNpc), at least one IF1 gene(s), encoding at least one IF1 protein/fragment or sequence variant thereof, {optionally another gene(s) also, optionally one or more genes coding for an enzyme in dopamine synthesis e.g. for tyrosine hydroxylase, this enzyme catalyses the rate-limiting step of dopamine synthesis, e.g. for aromatic L-amino acid decarboxylase (AADC)}, optionally in a viral vector(s), optionally in a lentiviral viral vector(s) (optionally ProSavin [253]) and/or an adeno-associated viral vector(s) (optionally AAV2 [254]), to dopaminergic neurons, which reduces their F₁F₀ ATP hydrolysis, especially if the resulting extra IF1 protein/fragment has an amino acid residue that cannot be phosphorylated (optionally alanine) at its “phosphorylation control switch” position and/or a H49K (or H49A or H49R) substitution (position 49 using “mature” {MIS cleaved off} human IF1 protein numbering) in its “pH dependence motif”, which slows the metabolic/aging rate in dopaminergic neurons, which reduces the subject's risk/progression of Parkinson's disease, wherein these dopaminergic neurons generate less metabolic heat, but this is substituted for by heat transfer from surrounding body areas, such that the dopaminergic neurons are maintained at normal body temperature, optionally wherein this therapy is administered alongside one or more other therapies for Parkinson's disease known to those of the art e.g. L-DOPA administration, deep brain stimulation etc. In other embodiments, additionally or instead of, at least one IF1 gene(s) is administered to another brain region(s), optionally a brain region(s) (whose dysfunction is) implicated in Parkinson's disease e.g. optionally by infusion directly into the subject's subthalamic nucleus (as used in) [253].

### Example Embodiments: IF1 Gene Therapy for Osteoarthritis

### Example Embodiments: IF1 Gene Therapy Extends Mouse Lifespan

[1449] At least one IF1 gene(s), encoding at least one IF1 protein/fragment or sequence variant thereof, optionally with a nucleotide change(s) that causes an amino acid residue change(s) at the “phosphorylation control switch” and/or the “pH dependence motif” in the IF1 protein coded for (these IF1 protein elements are defined in FIG. 10), with a promoter that can drive its expression, optionally the CMV enhancer element and a chicken β-actin promoter containing its first intron (regulatory element used in [255]; alternatively IF1 gene(s) is flanked by β-actin promoter and terminator), is delivered to a nascent B6 (B6C3F1) mouse embryo by pronuclear microinjection, wherein the resulting mouse has this extra IF1 gene(s) (with regulatory element(s) for expression) in all its cells (checked by PCR for a number of different cells from different tissues isolated from the mouse, amount of IF1 protein/fragment (or sequence variant thereof) is also assayed, wherein the genetically modified mouse should have more IF1 protein/fragment (or sequence variant thereof) in its cells). This protocol is repeated to generate a number of such genetically modified mice and their lifespans, and/or those of their progeny as they are mated with each other and/or back-crossed with C57BL/6J mice one or more times, are monitored as compared to control mice (no genetic modification), wherein the genetically modified mice have longer health- and/or life-(median and maximal) span. Food intake and body weight is monitored for all mice over their lifespan. Mice are kept in specific pathogen free conditions. Optionally the study is repeated or run in parallel with mice of a different genetic background. More details on the protocol to follow (e.g. number of mice and statistics to be used, healthspan assays that can be used {e.g. cardiac pathology, cataract development, oxidative damage, mitochondrial deletions etc.} etc.) can be sourced from emulating the protocol of [255]. A protocol of a different study of genetic manipulation and lifespan in the literature can be used instead e.g. [256]. But crucially, distinctly, all mice in the present study are housed at 37° C. The genetically modified mice have more IF1 protein/fragment (or sequence variant thereof) in their cells, less F₁F₀ ATP hydrolysis per unit time, less oxidative phosphorylation per unit time, less heat generation per unit time (not detrimental when ambient temperature is 37° C.), less ROS production per unit time, less oxidative damage per unit time, slower aging and longer lifespan and/or healthspan.

[1450] Instead of the IF1 transgene(s) adding an extra IF1 gene copy (or copies) to the mouse genome, as above, in an alternative disclosure embodiment, the IF1 transgene replaces the native IF1 gene by a “genetic knock-in” (replacement strategy based on homologous recombination), optionally wherein the IF1 transgene has a nucleotide change(s) that causes an amino acid residue change(s) at the “phosphorylation control switch” and/or the “pH dependence motif” in the IF1 protein coded for (these IF1 protein elements are defined in FIG. 10). These mice also have slower aging and longer lifespan and/or healthspan. IF appropriate thermoregulatory countermeasures are taken, e.g. as aforementioned.

### Example Embodiments: IF1 Gene Therapy, Restricted to Brain, Extends “Brainspan”

[1451] Transgenic mice are made via pronuclear microinjection of mouse embryos with at least one IF1 transgene(s), optionally with a nucleotide change(s) that causes an amino acid residue change(s) at the “phosphorylation control switch” and/or the “pH dependence motif” in the IF1 protein coded for (these IF1 protein elements are defined in FIG. 10), under the control of human neurofilament heavy polypeptide (NEFH) promoter, or other brain/neuron/astrocyte specific promoter of the art, some (non-limiting) examples of which have been mentioned herein already, optionally using multiple IF1 gene copies with different promoters to ensure IF1 transgene expression in both neurons and astrocytes. The mice are housed at an ambient temperature between 21 and 37° C. These genetically modified mice have more IF1 protein in their brain, wherein there is less F₁F₀ ATP hydrolysis per unit time, less oxidative phosphorylation per unit time, less heat generation per unit time (not detrimental when ambient temperature is 37° C., and not detrimental when ambient temperature is lower because heat transfer from the rest of the body, especially via blood flow, maintains the brain at 37° C.), less ROS production per unit time, less oxidative damage per unit time, slower brain aging and longer “brainspan” i.e. less cognitive decline with age, lower risk/later onset/slower progression of age-related/correlated brain disease(s) e.g. Alzheimer's disease, dementia, Parkinson's disease etc.

Some Antibodies of this Disclosure

[1452] An antibody that can inhibit/reduce F₁F₀ ATP hydrolysis (for example inside a cell, preferably a eukaryote cell, or in a Sub-Mitochondrial Particle [SMP] assay of F₁F₀ ATP hydrolysis), and/or use thereof (for at least one use disclosed herein), is componentry to this disclosure. In some embodiments, such an antibody is (innovatively) acquired by raising antibodies against an IF1 protein or a fragment thereof (so not ATP synthase), especially a C-terminal IF1 protein fragment, e.g. from human IF1, e.g. bovine IF1-(44-84) fragment, or a sub-fragment thereof, e.g. ALKKHHENEISHHAK, e.g. HHENEISHH, e.g. HENEISH (fragments 69-83, 73-81, 74-80 of SEQ ID NO:660 respectively), or the equivalent section of the IF1 protein of a different species (e.g. by immunizing an animal [e.g. rabbit] with an IF1 protein, or a fragment thereof, and recovering/isolating/purifying antibodies specific for it from the animal's serum; “Antibodies. A Laboratory Manual” by Harlow E, Lane D (1988) Cold Spring Harbor, USA). Componentry to this disclosure is an antibody, and/or use thereof (for at least one use disclosed herein), raised against an IF1 protein, or fragment thereof, that can block/reduce IF1 tetramerization (and higher oligomerization), and/or that can inhibit/reduce F₁F₀ ATP hydrolysis, and doesn't significantly inhibit F₁F₀ ATP synthesis, in an SMP assay of the art (with IF1 protein present, at alkali pH).

[1453] An (optionally produced/isolated/purified/substantially purified/partially purified) antibody specific for, which specifically binds, IF1 protein and reduces F₁F₀ ATP hydrolysis (for example inside a cell, preferably a eukaryote cell, or in an SMP assay of F₁F₀ ATP hydrolysis) and/or use thereof (for at least one use disclosed herein). An (optionally produced/isolated/purified/substantially purified/partially purified) antibody specific for, which specifically binds, the C-terminal region of IF1 and reduces F₁F₀ ATP hydrolysis (for example inside a cell, preferably a eukaryote cell, or in an SMP assay of F₁F₀ ATP hydrolysis) and/or use thereof (for at one least one use disclosed herein).

[1454] At points in this disclosure that an antibody/antibodies is referred to, in some embodiments, one or more of the following is being referred to: a polyclonal, monoclonal, monospecific, chimeric (non-limiting e.g. mouse and human), chimeric monoclonal, humanized, humanized monoclonal, fully human, fully human monoclonal, antibody/antibodies. A hybridoma thereof is also contemplated. At all points that an “antibody” is referred to herein, and/or plural thereof, in alternative embodiments this is substituted with “intrabody” and optionally plural thereof.

[1455] These antibodies of this disclosure are some amino acid sequences of this disclosure.

### Some Methods of the Disclosure

[1456] A method of obtaining a compound(s) that reduces F₁F₀ ATP hydrolysis, optionally for at least one use disclosed herein, comprising the steps of:
[1457] i. generating a three-dimensional computer model of IF1 protein or fragment thereof, preferably existing as a dimer, optionally from an NMR or crystal structure thereof, optionally using the NMR structure of the C-terminal end (residues: 44-84) of bovine IF1 protein, which exists as a dimer [189];
[1458] ii. electronically (optionally using a program of the art such as, without limitation, Autodock, Autodock Vina, a Molecular Dynamics program(s), GOLD, Glide [Schrödinger, New York, NY, USA]) testing/screening a compound, or a library of compounds (each preferably smaller than 1000 Daltons, optionally a library of compounds wherein all or most adhere to Lipinski's rule of five, optionally a library of the art, optionally a “virtual library” {e.g. http://zinc.docking.org/; Shoichet, J. Chem. Inf. Model., 45(1): 177-82, 2005}, optionally a number of amino acid sequences), with defined spatial coordinates in order to identify a compound(s) that can bind H49 and/or surrounding residues, and/or H55 and/or surrounding residues (using “mature” [without MIS] bovine IF1 protein numbering); and
[1459] iii. optionally a compound(s) that can bind with affinity in (ii) is synthesized and experimentally tested to see if it can block/reduce IF1 protein tetramerization (and higher oligomerization), and/or to see if it can inhibit/reduce F₁F₀ ATP hydrolysis, and not significantly inhibit F₁F₀ ATP synthesis, in an SMP assay of the art (with IF1 protein present, at alkali pH).

[1460] A drug(s) (for at least one use disclosed herein) identified by the aforementioned method is componentry to the present disclosure. The use of a drug(s) (for at least one use disclosed herein) identified by the aforementioned method is componentry to the present disclosure.

Some Peptides of this Disclosure

[1461] In the following synthesis scheme, Compound 1 is available from Ambinter, Orléans, France, Compounds 3 and 6 from Fisher Scientific (part of Thermo Fisher Scientific). Using the teaching of this scheme, the equivalent change at the N and/or C-terminal ends of any amino acid(s), optionally proteinogenic, optionally histidine, or any amino acid sequence(s), preferably one or more of the amino acid sequences herein, optionally then used for one or more of the uses mentioned herein, is componentry to the present disclosure.

[chemical structure]

[1462] In the following scheme, how to produce the starting material (peptide synthesis, 2 histidines joined by a peptide bond) is clear to someone of the art.

[chemical structure]

### Consolidatory Formula/Mechanism

[1463] This Formula consolidates prior formulas to present some preferred embodiments of this disclosure. These structures share the common motif:

[chemical structure]

[1464] especially:

[chemical structure]

[1465] Wherein each X3 is, independently at each point of use, absent, or hydrogen, or alkyl, or substituted alkyl (non-limiting example: CF₃), or deuterated alkyl (non-limiting example: CD₃), or aminoalkyl, or thioalkyl, or alkoxy, or haloalkyl, or haloalkoxy, or hydroxyalkyl, or any atom or isotope permitted by valence (including any accompanying hydrogens by valence e.g. (non-limiting) OH, NH₂, SH, SiH₃, PH₂ etc.), for example deuterium, or halogen, or fluorine;
[1466] Each X2^{xx} is, independently at each point of use, selected from a single bond, O, S, Se, NXP, PXP, BXP, C(X^{p})₂ or Si(X^{p})₂, wherein each X^{p} is, independently at each point of use, selected from a constituent group of X3 (defined earlier);
[1467] xx and xy are each independently selected from 0, 1, 2, 3, 4, 5;
[1468] X1 is

[chemical structure]

[1469] wherein Markush symbols are as defined previously for Formula (I), or

[chemical structure]

[1470] wherein Markush symbols are as defined previously for Formula (II), or

[chemical structure]

[1471] wherein Markush symbols are as defined previously for Formula (III), or

[chemical structure]

[1472] wherein Markush symbols are as defined previously for Formula (IV), or

[chemical structure]

[1473] wherein each AAR is, independently at each point of use, an amino acid side chain, optionally (but not restrictively) the side chain of an amino acid coded for by the genetic code, each AAA is, independently at each point of use, an amino acid (proteingenic or non-proteingenic) or a chain of amino acids (proteingenic, or non-proteingenic or a combination thereof) linked by peptide bonds, preferably not exceeding 300 amino acid residues, optionally an amino acid sequence coded for by a component of a genome, optionally an IF1 protein/fragment (or sequence variant thereof), preferably an amino acid sequence falling under Formula (VIII) and/or presented in FIG. 10, optionally wherein one or more of the amino acids have a post-translational modification(s), and/or a modification/manipulation to increase plasma stability, wherein such strategies are well known to those of the art e.g. swopping stereochemistry (D instead of L) of one or more amino acids, optionally with a modification at their N and/or C-terminal ends as disclosed elsewhere herein.

[1474] Whilst it is true that compounds of Formula (V) don't have this imidazole structural motif, it is also true that they aren't particularly potent inhibitors of F₁F₀ ATP hydrolysis.

[1475] IF1 protein monomers and IF1 protein dimers can inhibit F₁F₀ ATP hydrolysis because their F₁F₀ ATP hydrolysis domain is exposed. Higher IF1 protein oligmers (>dimer) cannot inhibit F₁F₀ ATP hydrolysis because their F₁F₀ ATP hydrolysis domain is buried in the IF1 oligomer, thence higher oligomerization (>dimer) sequesters IF1 protein from inhibiting F₁F₀ ATP hydrolysis, and this is the basis to the pH dependence of IF1 protein inhibition of F₁F₀ ATP hydrolysis: higher pH=IF1 higher (>dimer) oligomerization and low F₁F₀ ATP hydrolysis inhibition, lower pH=higher (>dimer) IF1 oligomers break up and high F₁F₀ ATP hydrolysis inhibition. Without wishing to be restricted by theory, how this imidazole motif enables a compound to inhibit F₁F₀ ATP hydrolysis is that it interacts with, and locates the compound to, one or more histidines in the pH dependence motif of IF1 protein (FIG. 10B) and its location here blocks the higher oligomerization (>dimer) of IF1 protein, without blocking the F₁F₀ ATP hydrolysis domain of IF1 protein, and so there are more free IF1 protein monomers and dimers, thence more inhibition of F₁F₀ ATP hydrolysis. So, the compound interacts with, and exerts its action through, IF1 protein rather than ATP synthase. The compound can reduce F₁F₀ ATP synthesis, but this is by uncoupling rather than by interaction with ATP synthase and direct inhibition of F₁F₀ ATP synthesis (FIG. 17, and its legend, in PCT/EP2018/069175). Componentry to this disclosure is any compound(s) that interacts with IF1 protein, optionally the “pH dependence motif” of IF1 protein (FIG. 10B), optionally wherein the compound(s) has an imidazole motif, or analogue thereof, to reduce/prevent/stop the higher (>dimer) oligomerization of IF1 protein, optionally to treat/prevent/ameliorate/combat one or more of the diseases or disorders or physiological processes or sub-optimalities mentioned herein, optionally cancer and/or aging.

[1476] With a compound(s) of this disclosure bound, IF1 protein can still inhibit F₁F₀ ATP hydrolysis, but with the compound bound, IF1 protein cannot higher (>dimer) oligomerize and so there is more free IF1 monomer/dimer and so greater inhibition of F₁F₀ ATP hydrolysis. Thence the size/shape of the compound is paramount, such that is blocks/interferes with the higher (>dimer) oligomerization, and not the inhibitory domain, of IF1 protein. The higher (>dimer) oligomerization domain (or part thereof, or modified form thereof) of IF1 protein, without the inhibitory domain of IF1 protein attached, is componentry to this disclosure (FIG. 10).

[1477] A method to find a compound of this disclosure is to assess whether a compound reduces/prevents/stops the higher (>dimer) oligomerization of IF1 protein at alkaline pH (e.g. pH 8). If so, in an optional but preferable 2^{nd} step, it is assessed whether the compound doesn't (necessary) block IF1 protein inhibition of F₁F₀ ATP hydrolysis in a Sub-Mitochondrial Particle (SMP) assay, optionally conducted at pH 6.7. In a 3^{rd} step, or as an alternative 2^{nd} step, it is assessed whether the compound enhances (preferable) IF1 protein inhibition of F₁F₀ ATP hydrolysis in a Sub-Mitochondrial Particle (SMP) assay, optionally conducted at pH 8, optionally wherein action through IF1 protein, rather than direct action upon ATP synthase, can be assayed by observing the effect of removing endogenous IF1 protein from the SMP assay. At alkaline pH (e.g. pH 8), if there is much less F₁F₀ ATP hydrolysis inhibition with much less IF1 protein in the assay, then the compound is acting upon F₁F₀ ATP hydrolysis via interaction with IF1 protein rather than directly upon ATP synthase. If a compound hits criterion/criteria in one or more of these steps, and most preferably in all 3 of these steps, then it is a compound of this disclosure. In some embodiments a screening method is employed using one or more of these steps, wherein a number of compounds are tested in this method to find one or more compounds that reduces/prevents/stops the higher (>dimer) oligomerization of IF1 protein at alkaline pH (e.g. pH 8) and increases IF1 protein inhibition of F₁F₀ ATP hydrolysis at alkaline pH (e.g. pH 8). The 1^{st} step of this method is especially suited to high throughput screening, and only those compounds that pass the 1^{st} step need be entered into the more technically/time demanding 2^{nd} and/or 3^{rd} steps. In some embodiments one or more of these steps is performed at the European Lead Factory.

### Definitions Used to Specify Formulas (I), (II), (III), (IV), (V), (VI), (VII) and (VIII)

[1478] The initial definition provided for a group or term herein applies to that group or term throughout the present specification, individually or as part of another group, unless otherwise indicated.

[1479] The term “alkyl” refers to straight or branched chain hydrocarbon groups having 1 to 21 carbon atoms, preferably 1 to 8 carbon atoms. Lower alkyl groups, that is, alkyl groups of 1 to 4 carbon atoms, are most preferred.

[1480] The term “substituted alkyl” refers to an alkyl group as defined above having one, two, three, or four substituents independently selected from the group consisting of PH2, deuterium, halogen, trifluoromethyl, alkenyl, alkynyl, nitro, cyano, CH, keto (═O), ORₐ, SRₐ, NRₐR_{b}, NRₐSO₂, NRₐSO₂R_{c}, SO₂R_{c}, SO₂NRₐR_{b}, CO₂Rₐ, C(═O)Rₐ, C(═O)NRₐR_{b}, OC(═O)Rₐ, —OC(═O)NRₐR_{b}, NRₐC(═O)R_{b}, NRₐCO₂R_{b}, ═N—OH, ═N—O-alkyl, aryl, heteroaryl, heterocyclo and cycloalkyl, wherein Rₐ and R_{b} are independently selected from hydrogen, alkyl, alkenyl, cycloalkyl, heterocyclo, aryl, and heteroaryl, and R_{c} is selected from hydrogen, alkyl, cycloalkyl, heterocyclo aryl and heteroaryl. When a substituted alkyl includes an aryl, heterocyclo, heteroaryl, or cycloalkyl substituent, said ringed systems are as defined below and thus may in turn have zero to four independently selected substituents (preferably 0-2 substituents), also as defined below. When either Rₐ, R_{b} or R_{c} is an alkyl, said alkyl may optionally be substituted with 1-2 (selected independently) of PH₂, deuterium, halogen, trifluoromethyl, alkenyl, alkynyl, nitro, cyano, CH, keto (═O), OH, O(alkyl), phenyloxy, benzyloxy, SH, S(alkyl), NH₂, NH(alkyl), N(alkyl)₂, NHSO₂, NHSO₂(alkyl), SO₂(alkyl), SO₂NH₂, SO₂NH(alkyl), CO₂H, CO₂(alkyl), C(═O)H, C(═O)alkyl, C(═O)NH₂, C(═O)NH(alkyl), C(═O)N(alkyl)₂, OC(═O)alkyl, —OC(═O)NH₂, —OC(═O)NH(alkyl), NHC(═O)alkyl, and/or NHCO₂(alkyl).

[1481] “Alkyl” when used in conjunction with another group such as in arylalkyl refers to a substituted alkyl in which at least one of the substituents is the specifically named group. For example, the term arylalkyl includes benzyl, or any other straight or branched chain alkyl having at least one aryl group attached at any point of the alkyl chain. As a further example, the term carbamylalkyl includes the group —(CH₂), —NH—C(═O)alkyl, Wherein n is 1 to 12.

[1482] The term “alkenyl” refers to straight or branched chain hydrocarbon groups having 2 to 21 carbon atoms and at least one double bond. Alkenyl groups of 2 to 6 carbon atoms and having one double bond are most preferred.

[1483] The term “alkynyl” refers to straight or branched chain hydrocarbon groups having 2 to 21 carbon atoms and at least one triple bond. Alkynyl groups of 2 to 6 carbon atoms and having one triple bond are most preferred.

[1484] The term “alkylene” refers to bivalent straight or branched chain hydrocarbon groups having 1 to 21 carbon atoms, preferably 1 to 8 carbon atoms, e.g., {—CH₂—}ₙ, Wherein n is 1 to 12, preferably 1-8. Lower alkylene groups, that is, alkylene groups of 1 to 4 carbon atoms, are most preferred. The terms “alkenylene” and “alkynylene” refer to bivalent radicals of alkenyl and alkynyl groups, respectively, as defined above.

[1485] When reference is made to a substituted alkylene, alkenylene, or alkynylene group, these groups are substituted with one to four substituents as defined above for alkyl groups. A substituted alkylene, alkenylene, or alkynylene may have a ringed substituent attached in a spiro fashion as in

[chemical structure]

and so forth.

[1486] The term “alkoxy” refers to an alkyl or substituted alkyl group as defined above having one, two or three oxygen atoms (—O—) in the alkyl chain. For example, the term “alkoxy” includes the groups-O-C₁₋₁₂alkyl, —C₁₋₆alkylene-O—C₁₋₆alkyl, —C₁₋₄alkylene-O-phenyl, and so forth.

[1487] The term “thioalkyl” or “alkylthio” refers to an alkyl or substituted alkyl group as defined above having one or more sulphur (—S—) atoms in the alkyl chain. For example, the term “thioalkyl” or “alkylthio” includes the groups —(CH₂)ₙ-S-CH₂aryl, —(CH₂)ₙ-S-aryl, etc, etc.

[1488] The term “aminoalkyl” or “alkylamino” refers to an alkyl or substituted alkyl group as defined above having one or more nitrogen (—NR′—) atoms in the alkyl chain. For example, the term “aminoalkyl” includes the groups —NR′—C₁₋₁₂alkyl and —CH₂—NR′-aryl, etc. (where R′ is hydrogen, alkyl or substituted alkyl as defined above.) “Amino” refers to the group-NH₂.

[1489] When a subscript is used as in C₁₋₈alkyl, the subscript refers to the number of carbon atoms the group may contain. Zero when used in a subscript denotes a bond, e.g., C₀₋₄ alkyl refers to a bond or an alkyl of 1 to 4 carbon atoms. When used with alkoxy, thioalkyl or aminoalkyl, a subscript refers to the number of carbon atoms that the group may contain in addition to heteroatoms. Thus, for example, monovalent. C₁₋₂aminoalkyl includes the groups —CH₂—NH₂, —NH—CH₃, —(CH₂)₂—NH₂, —NH—CH₂—CH₃, —CH₂—NH₂—CH₃, and —N—(CH₃)₂. A lower aminoalkyl comprises an aminoalkyl having one to four carbon atoms.

[1490] The alkoxy, thioalkyl, or aminoalkyl groups may be monovalent or bivalent. By “monovalent” it is meant that the group has a valency (i.e., power to combine with another group), of one, and by “bivalent” it is meant that the group has a valency of two. For example, a monovalent alkoxy includes groups such as —O-C₁₋₁₂alkyl, —C₁₋₆alkylene-O—C₁₋₆alkyl, etc., whereas a bivalent alkoxy includes groups such as —O—C₁₋₂alkylene-, —C₁₋₆alkylene-O—C₁₋₆alkylene-, etc.

[1491] The term “acyl” refers to a carbonyl

[chemical structure]

linked to an organic group i.e.

[chemical structure]

wherein R_{d} may be selected from alkyl, alkenyl, substituted alkyl, substituted alkenyl, aryl, heterocyclo, cycloalkyl, or heteroaryl, as defined herein.

[1492] The term “alkoxycarbonyl” refers to a group having a carboxy or ester group

[chemical structure]

linked to an organic radical, i.e.,

[chemical structure]

[1493] Wherein R_{d} is as defined above for acyl.

[1494] The term “carbamyl” refers to a functional group in which a nitrogen atom is directly bonded to a carbonyl, i.e., as in —NRₑC(═O)R_{f} or —C(═O)NRₑR_{f}, wherein Rₑ and R_{f} can be hydrogen, alkyl, substituted alkyl, alkenyl, substituted alkenyl, alkoxy, cycloalkyl, aryl, heterocyclo, or heteroaryl, or they may join to form a ring.

[1495] The term “sulfonyl” refers to a sulphoxide group (i.e., —S(O)₁₋₂) linked to an organic radical R_{c}, as defined above.

[1496] The term “sulfonamide” or “sulfonamido” refers to the group —S(O)₂NRₑR_{f}, wherein Rₑ and R_{f} are as defined above. Preferably when one of Rₑ and R_{f} is optionally substituted heteroaryl or heterocyclo (as defined below), the other of Rₑ and R_{f} is hydrogen or alkyl.

[1497] The term “cycloalkyl” refers to fully saturated and partially unsaturated hydrocarbon rings of 3 to 9, preferably 3 to 7 carbon atoms. The term “cycloalkyl” includes such rings having zero to four substituents (preferably 0-2 substituents), independently selected from the group consisting of OH, SH, PH2, deuterium, halogen, alkyl, substituted alkyl (e.g., trifluoromethyl), alkenyl, substituted alkenyl, alkynyl, nitro, cyano, CH, keto, amino, alkoxy, hydroxy, methoxy, haloalkoxy, OCF₃, OR_{d}, SR_{d} NR_{d}Rₑ NR_{c}SO₂, NR_{c}SO₂Rₑ, C(═O)H, acyl, —CO₂H, alkoxycarbonyl, carbamyl, sulfonyl, sulfonamide, —OC(═O)R_{d}, ═N—OH, ═N—O-alkyl, aryl, heteroaryl, heterocyclo, a 4 to 7 membered carbocyclic ring, and a five or six membered ketal, e.g., 1,3-dioxolane or 1,3-dioxane, wherein R_{c}, R_{d} and Rₑ are defined as above. The term “cycloalkyl” also includes such rings having a phenyl ring fused thereto or having a carbon-carbon bridge of 3 to 4 carbon atoms. Additionally, when a cycloalkyl is substituted with a further ring, i.e., aryl, arylalkyl, heteroaryl, heteroarylalkyl, heterocyclo, heterocycloalkyl, cycloalkylalkyl, or a further cycloalkyl ring, such ring in turn may be substituted with one to two of C₀₋₄alkyl optionally substituted with one or more groups independently selected from OH, SH, PH2, halogen, trifluoromethyl, alkenyl, alkynyl, nitro, cyano, CH, keto (═O), amino, alkoxy, hydroxy, methoxy, haloalkoxy, OCF₃, O(alkyl), phenyloxy, benzyloxy, SH, S(alkyl), NH₂, NH(alkyl), N(alkyl)₂, NHSO₂, NHSO₂(alkyl), SO₂(alkyl), SO₂NH₂, SO₂NH(alkyl), CO₂H, CO₂(alkyl), C(═O)H, C(═O)alkyl, C(═O)NH₂, C(═O)NH(alkyl), C(═O)N(alkyl)₂, OC(═O)alkyl, —OC(═O)NH₂, —OC(═O)NH(alkyl), NHC(═O)alkyl, and NHCO₂(alkyl).

[1498] The term “halo” or “halogen” refers to chloro, bromo, fluoro and iodo.

[1499] The term “haloalkyl” means a substituted alkyl having one or more halo substituents. For example, “haloalkyl” includes mono, bi, and trifluoromethyl.

[1500] The term “haloalkoxy” means an alkoxy group having one or more halo substituents. For example, “haloalkoxy” includes OCF₃.

[1501] The term “aryl” refers to phenyl, biphenyl, 1-naphthyl, 2-naphthyl, and anthracenyl, with phenyl being preferred. The term “aryl” includes such rings having zero to four substituents (preferably 0-2 substituents), independently selected from the group consisting of deuterium, OH, SH, PH2, halo, alkyl, substituted alkyl (e.g., trifluoromethyl), alkenyl, substituted alkenyl, alkynyl, nitro, cyano, amino, alkoxy, hydroxy, methoxy, haloalkoxy, OCF₃, CH, OR_{d}, SR_{d}, NR_{d}Rₑ, NR_{d}SO₂, NRₐSO₂R_{c}, C(═O)H, acyl, —CO₂H, alkoxycarbonyl, carbamyl, sulfonyl, sulfonamide, —OC(═O)R_{d}, heteroaryl, heterocyclo, cycloalkyl, phenyl, benzyl, napthyl, including phenylethyl, phenyloxy, and phenylthio, wherein R_{c}, R_{d} and Re are defined as above. Additionally, two substituents attached to an aryl, particularly a phenyl group, may join to form a further ring such as a fused or spiro-ring, e.g., cyclopentyl or cyclohexyl or fused heterocyclo or heteroaryl. When an aryl is substituted with a further ring, such ring in turn may be substituted with one to two of C₀₋₄alkyl optionally substituted one or more groups independently selected from deuterium, SH, PH₂, halogen, trifluoromethyl, alkenyl, alkynyl, nitro, cyano, amino, alkoxy, hydroxy, methoxy, haloalkoxy, OCF₃, CH, keto (═O), OH, O(alkyl), phenyloxy, benzyloxy, SH, S(alkyl), NH₂, NH(alkyl), N(alkyl)2, NHSO₂, NHSO₂(alkyl), SO₂(alkyl), SO₂NH₂, SO₂NH(alkyl), CO₂H, CO₂(alkyl), C(═O)H, C(═O)alkyl, C(═O)NH₂, C(═O)NH(alkyl), C(═O)N(alkyl)₂, OC(═O)alkyl, —OC(═O)NH₂, —OC(═O)NH(alkyl), NHC(═O)alkyl, and NHCO₂(alkyl).

[1502] The term “heterocyclo” refers to substituted and unsubstituted non-aromatic 3 to 7 membered monocyclic groups, 7 to 11 membered bicyclic groups, and 10 to 15 membered tricyclic groups, in which at least one of the rings has at least one heteroatom selected from O, S and N. Each ring of the heterocyclo group containing a heteroatom can contain one or two oxygen or sulfur atoms and/or from one to four nitrogen atoms provided that the total number of heteroatoms in each ring is four or less, and further provided that the ring contains at least one carbon atom. The fused rings completing bicyclic and tricyclic groups may contain only carbon atoms and may be saturated, partially saturated, or unsaturated. The nitrogen and sulfur atoms may optionally be oxidized and the nitrogen atoms may optionally be quaternized. The heterocyclo group may be attached at any available nitrogen or carbon atom. The heterocyclo ring may contain zero to four substituents (preferably 0-2 substituents), independently selected from the group consisting of deuterium, OH, SH, PH2, halo, alkyl, substituted alkyl (e.g., trifluoromethyl), alkenyl, substituted alkenyl, alkynyl, nitro, cyano, amino, alkoxy, hydroxy, methoxy, haloalkoxy, OCF₃, CH, keto, ORₐ, SRₐ, NR_{d}Rₑ, NRₐSO₂, NRₐSO₂R_{c}, SO₂Rₐ, C(═O)H, acyl, —CO₂H, alkoxycarbonyl, carbamyl, sulfonyl, sulfonamide, —OC(═O)R_{d}, ═N—OH, ═N—O-alkyl, aryl, heteroaryl, cycloalkyl, a five or six membered ketal, e.g., 1,3-dioxolane or 1,3-dioxane, or a monocyclic 4 to 7 membered non aromatic ring having one to four heteroatoms, wherein R_{c}, R_{d} and Rₑ are defined as above. The term “heterocyclo” also includes such rings having a phenyl ring fused thereto or having a carbon-carbon bridge of 3 to 4 carbon atoms. Additionally, when a heterocyclo is substituted with a further ring, i.e., aryl, arylalkyl, heteroaryl, heteroarylalkyl, cycloalkyl, cycloalkylalkyl, heterocycloalkyl, or a further heterocyclo ring, such ring in turn may be substituted with one to two of C₀₋₄alkyl optionally substituted with one or more groups independently selected from deuterium, SH, PH₂, halogen, trifluoromethyl, alkenyl, alkynyl, nitro, cyano, amino, alkoxy, hydroxy, methoxy, haloalkoxy, OCF₃, CH, keto (═O), OH, O(alkyl), phenyloxy, benzyloxy, SH, S(alkyl), NH₂, NH(alkyl), N(alkyl)₂, NHSO₂, NHSO₂(alkyl), SO₂(alkyl), SO₂NH₂, SO₂NH(alkyl), CO₂H, CO₂(alkyl), C(═O)H, C(═O)alkyl, C(═O)NH₂, C(═O)NH(alkyl), C(═O)N(alkyl)₂, OC(═O)alkyl, —OC(═O)NH₂, —OC(═O)NH(alkyl), NHC(═O)alkyl, and NHCO₂(alkyl).

[1503] Exemplary monocyclic groups include azetidinyl, pyrrolidinyl, oxetanyl, imidazolinyl, oxazolidinyl, isoxazolinyl, thiazolidinyl, isothiazolidinyl, tetrahydrofuranyl, piperidinyl, piperazinyl, 2-oxopiperazinyl, 2-oxopiperidinyl, 2-oxopyrrolodinyl, 2-oxoazepinyl, azepinyl, 4-piperidonyl, tetrahydropyranyl, morpholinyl, thiamorpholinyl, thiamorpholinyl sulfoxide, thiamorpholinyl sulfone, 1,3-dioxolane and tetrahydro-1,1-dioxothienyl and the like. Exemplary bicyclic heterocyclo groups include quinuclidinyl.

[1504] The term “heteroaryl” refers to substituted and unsubstituted aromatic 5 to 7 membered monocyclic groups, 9 or 10 membered bicyclic groups, and 11 to 14 membered tricyclic groups which have at least one heteroatom selected from O, S and N in at least one of the rings. Each ring of the heteroaryl group containing a heteroatom can contain one or two oxygen or sulfur atoms and/or from one to four nitrogen atoms provided that the total number of heteroatoms in each ring is four or less and each ring has at least one carbon atom. The fused rings completing the bicyclic and tricyclic groups may contain only carbon atoms and may be saturated, partially saturated, or unsaturated. The nitrogen and sulfur atoms may optionally be oxidized and the nitrogen atoms may optionally be quaternized. Heteroaryl groups which are bicyclic or tricyclic must include at least one fully aromatic ring but the other fused ring or rings may be aromatic or non-aromatic. The heteroaryl group may be attached at any available nitrogen or carbon atom of any ring. The heteroaryl ring system may contain zero to four substituents (preferably 0-2 substituents), independently selected from the group consisting of deuterium, OH, SH, PH2, halo, alkyl, substituted alkyl (e.g., trifluoromethyl), alkenyl, substituted alkenyl, alkynyl, nitro, cyano, amino, alkoxy, hydroxy, methoxy, haloalkoxy, OCF₃, CH, OR_{d}, SR_{d}, NR_{d}Rₑ, NR_{d}SO₂, NR_{d}SO₂R_{c}, SO₂R_{d}, C(═O)H, acyl, —CO₂H, alkoxycarbonyl, carbamyl, sulfonyl, sulfonamide, —OC(═O)Rₐ, heterocyclo, cycloalkyl, aryl, or a monocyclic 4 to 7 membered aromatic ring having one to four heteroatoms, including phenylethyl, phenyloxy, and phenylthio, wherein R_{c}, R_{d} and Rₑ are defined as above. Additionally, when a heteroaryl is substituted with a further ring, i.e., aryl, arylalkyl, heterocyclo, heterocycloalkyl, cycloalkyl, cycloalkylalkyl, heteroarylalkyl, or a further heteroaryl ring, such ring in turn may be substituted with one to two of C₀₋₄ alkyl optionally substituted with one or more groups independently selected from deuterium, PH₂, halogen, trifluoromethyl, alkenyl, alkynyl, nitro, cyano, amino, alkoxy, hydroxy, methoxy, haloalkoxy, OCF₃,CH, keto (═O), OH, O(alkyl), phenyloxy, benzyloxy, SH, S(alkyl), NH₂, NH(alkyl), N(alkyl)₂, NHSO₂, NHSO₂(alkyl)ₙ, SO₂(alkyl), SO₂NH₂, SO₂NH(alkyl), CO₂H, CO₂(alkyl), C(═O)H, C(═O)alkyl, C(═O)NH₂, C(═O)NH(alkyl), C(═O)N(alkyl)₂, OC(═O)alkyl, —OC(═O)NH₂, —OC(═O)NH(alkyl), NHC(═O)alkyl, and NHCO₂(alkyl).

[1505] Exemplary monocyclic heteroaryl groups include pyrrolyl, pyrazolyl, pyrazolinyl, imidazolyl, oxazolyl, isoxazolyl, thiazolyl

[chemical structure]

thiadiazolyl, isothiazolyl, furanyl, thienyl, oxadiazolyl, pyridyl, pyrazinyl, pyridinyl, pyrimidinyl, pyridazinyl, triazinyl and the like.

[1506] Exemplary bicyclic heteroaryl groups include indolyl, benzothiazolyl, benzodioxolyl, benzoxaxolyl, benzothienyl, quinolinyl, tetrahydroisoquinolinyl, isoquinolinyl, benzimidazolyl, benzopyranyl, indolizinyl, benzofuranyl, chromonyl, coumarinyl, benzopyranyl, cinnolinyl, quinoxalinyl, indazolyl, pyrrolopyridyl, furopyridinyl, dihydroisoindolyl, tetrahydroquinolinyl and the like.

[1507] Exemplary tricyclic heteroaryl groups include carbazolyl, benzidolyl, phenanthrollinyl, acridinyl, phenanthridinyl, xanthenyl and the like.

[1508] When the term “unsaturated” is used herein to refer to a ring or group, the ring or group may be fully unsaturated or partially unsaturated.

[1509] The phrase “optionally substituted” is intended to include substituted or unsubstituted possibilities. Accordingly, the phrase “each group of which may be optionally substituted” means that each group includes both substituted and unsubstituted groups. Where a list of substituents is specified for a group, unless specified otherwise, all substituent combinations permitted by valence are contemplated.

[1510] The use of the phrase “Where valence allows” means that the groups may be substituted only to the degree and nature allowed by valency of the group. This is commonly understood by those of skill in the art. For example, a hydrogen substituent cannot be further substituted nor can a phenyl group be directly substituted by an oxo group due to limits on valency.

[1511] The term “substituted amino” refers to a group of the formula —NZ²Z³ wherein Z² is hydrogen, alkyl, cycloalkyl, aryl, arylalkyl, (cycloalkyl)alkyl, morpholinylalkyl, heterocyclo or (heterocyclo)alkyl and Z³ is hydrogen, alkyl, cycloalkyl, aryl, arylalkyl, haloalkyl, hydroxyalkyl, alkoxyalkyl, thioalkyl, (cycloalkyl)alkyl or hydroxyalkyl further substituted with a carboxylic ester and/or carboxylic acid, with the proviso that when Z² is hydrogen, then Z³ is other than hydrogen; or Z² and Z³ taken together with the nitrogen atom to which they are attached are 1-pyrrolidinyl, 1-piperidinyl, 1-azepinyl, 4-morpholinyl, 4-thiamorpholinyl, 1-piperazinyl, 4-alkyl-1-piperazinyl, 4-arylalkyl-1-piperazinyl, 4-diarylalkyl-1-piperazinyl; or 1-pyrrolidinyl, 1-piperidinyl, 1-azepinyl substituted with one or more groups independently selected from alkyl, alkoxy, alkylthio, halo, trifluoromethyl or hydroxy.

[1512] Hydroxy, hydroxyl and —OH are used interchangeably herein.

[1513] The term “heterocyclo” or “hetero” also includes such monocyclic and bicyclic rings wherein an available carbon atom is substituted with a (C₁-C₄)-alkyl, aryl, (C₁-C₄)-alkylthio, (C₁-C₄)-alkoxy, halo, nitro, keto, cyano, CH, hydroxy, azo, thiazo, amino, —NH—(C₁-C₄)-alkyl, —N((C₁-C₄)-alkyl)₂, —CF₃, (aminoester)alkyl, carboxylic acid, carboxylic ester, —OCHF₂ or (C₁-C₄)-alkoxy further substituted with a carboxylic acid or such monocyclic and bicyclic rings wherein two or three available carbons have substituents independently selected from methyl, methoxy, methylthio, halo, —CF₃, nitro, hydroxy, amino and —OCHF₂.

[1514] Herein, when “carboxyl” or “carboxylic acid” is used, this can mean-C(O) OH but can also refer to carboxylic ester or ester, which encompasses —OC(O)ORₑₛₜₑᵣ and —C(O)ORₑₛₜₑᵣ wherein Rₑₛₜₑᵣ is selected from hydrogen, deuterium, alkyl, alkenyl, alkoxy, thioalkyl, aminoalkyl, cycloalkyl, haloalkyl, haloalkoxy, aryl, heteroaryl or heterocyclo, each of which may be optionally substituted, as defined herein.

[1515] Use of “aryl” herein encompasses “aryloxy”, which refers to —O-aryl, wherein aryl is selected from prior definition of aryl specified herein. Use of “heteroaryl” herein encompasses “heteroaryloxy”, which refers to —O-heteroaryl, wherein heteroaryl is selected from prior definition of heteroaryl specified herein. Use of “heterocyclo” herein encompasses “hetereocyclooxy”, which refers to —O-heterocyclo, wherein heterocyclo is selected from prior definition of heterocyclo specified herein.

[1516] Use of “ether” herein encompasses —ORₑₜₕₑᵣ wherein Rₑₜₕₑᵣ is selected from hydrogen, deuterium, alkyl, alkenyl, alkoxy, thioalkyl, aminoalkyl, cycloalkyl, haloalkyl, haloalkoxy, aryl, heteroaryl or heterocyclo, each of which may be optionally substituted, as defined herein.

[1517] Alkylaryl groups are aryl groups substituted with one or more alkyl groups wherein the alkyl groups optionally carry additional substituents and the aryl groups are optionally substituted. Specific alkylaryl groups include alkyl-substituted phenyl groups such as methylphenyl.

[1518] At various places herein, substituents of compounds are disclosed in groups or in ranges. It is specifically intended that this disclosure include each and every individual sub-combination of the members of such groups and ranges. For example, the term “C₁₋₃alkyl” is intended to include C₁alkyl (methyl), C₂alkyl (ethyl), C₃alkyl.

[1519] It should be understood that each numerical range within this disclosure also contemplates every possible sub-range within said range. For example, the description of a group having the range of 1-10 carbons also contemplates a group possessing a sub-range of, for (non-limiting) example, 1-3, 1-5, 1-8, or 2-3, 2-5, 2-8, 3-4, 3-5, 3-7, 3-9, 3-10, etc., carbons. Thus, the range 1-10 should be understood to represent the outer boundaries of the range, within which many possible sub-ranges are also contemplated. Additional examples, contemplating ranges in other contexts, can be found in this disclosure wherein such ranges include analogous sub-ranges within.

### Stereoisomers

[1520] All stereoisomers of Formula [X], such as those, for example, which may exist due to asymmetric carbons, including enantiomeric forms (which may exist even in the absence of asymmetric carbons) and diastereomeric forms, are contemplated and within the scope of this disclosure. Individual stereoisomers of the compounds of this disclosure may, for example, be substantially free of other isomers, or may be admixed, for example, as racemates or with all other or other selected, stereoisomers. The chiral centers of the present disclosure can have the S or R configuration as defined by the IUPAC 1974 Recommendations.

[1521] This disclosure encompasses the use of stereomerically pure forms of a compound(s) of this disclosure, as well as the use of mixtures of those forms. For example, mixtures comprising equal or unequal amounts of the enantiomers of a compound(s) of Formula [X], for example a compound(s) of Formula (I), may be used in methods and compositions disclosed herein. These isomers may be asymmetrically synthesized or resolved using standard techniques such as chiral columns or chiral resolving agents. See, e.g., Jacques, J., et al., Enantiomers, Racemates and Resolutions (Wiley-Interscience, New York, 1981); Wilen, S. H., et al., Tetrahedron 33:2725(1977); Eliel, E. L., Stereochemistry of Carbon Compounds (McGraw-Hill, N Y, 1962); and Wilen, S. H., Tables of Resolving Agents and Optical Resolutions p. 268 (E. L. Eliel, Ed., Univ. of Notre Dame Press, Notre Dame, Ind., 1972).

[1522] For a compound of this disclosure: the disclosure contemplates all combinations, pure forms, forms of high purity, particle sizes, polymorphs, crystals, co-crystals, self-aggregates, colloids, colloid forms as described in [257-258] and/or other paper(s) from the same research group, light scattering forms, metabolites, derivatives, isotopologues, geometric/conformational isomers, rotamers, atropisomers, atropenantiomers, stereoisomers, optically active forms, racemates, scalemates, epimers, tautomers, keto-enol tautomers, cis- and trans-isomers, E and Z isomers, R- and S-enantiomers, diastereomers, isomers, (D)-isomers, (L)-isomers, the racemic mixtures thereof, other mixtures thereof, isomers, isomer substantially free of other isomer(s), mixtures of isomers and isotopic variants (e.g. deuterium in place of hydrogen in some or all places upon the molecule{s}) as falling within the scope of this disclosure. All such isomers, as well as mixtures thereof, are intended to be included in this disclosure. As well as analogues and pharmaceutically/physiologically acceptable salts/ethers/esters/solvates/hydrates/solvates of salts/chelates/complexes/metal complexes/mixtures/prodrugs/particles/radionuclides/derivatives/carriers/crystalline forms/isomorphic crystalline forms/crystals/co-crystals/clathrates/liposomes/fusogenic liposomes/mixed_liposomes/exosomes/vesicles/chylomicrons/lipospheres/nanoparticles/microparticles/microbubbles/micronized forms/polymer matrices/drug-polymer conjugates/microspheres/micelles/mixed micelles of surfactants/mixed micelles of surfactant-phospholipid/niosomes/oleosomes/ethosomes/Lipid Based Nanoparticles (LNPs)/Nanoparticle-Stabilized Nanocapsules (NPSCs)/solid lipid nanoparticles/nanostructured lipid carriers/millicapsules/microcapsules/nanocapsules/millispheres/microspheres/nanospheres/miniparticles/milliparticles/microparticles/nanoparticles/microemulsions/nanoemulsions/sponges/microsponges/cyclod extrins/compositions/formulations/doses/combinations/N-oxides/acid salt hydrates thereof (and combination[s] thereof). Contemplated is a compound of this disclosure bound to albumin. Unless indicated otherwise, chemical structures and graphical representations of compounds herein encompass all stereoisomers, racemates, scalemates, relative proportions/combinations of R and S stereoisomers and optically active or inactive forms. Optically active forms may be prepared by resolution of racemic forms or by synthesis from optically active starting materials. Many geometric isomers of C═C double bonds, C═N double bonds, ring systems, and the like can also be present in the compounds, and all such stable isomers are contemplated in the present disclosure. Substituents around a carbon-carbon double bond are designated as being in the “Z” or “E” configuration wherein the terms “Z” and “E” are used in accordance with IUPAC standards. Unless otherwise specified, structures depicting double bonds encompass both the “E” and “Z” isomers. The present disclosure includes all cis, trans, syn, anti, entgegen (E), and zusammen (Z) isomers as well as the appropriate mixtures thereof. Compounds of the present disclosure, free form and salts thereof, may exist in multiple tautomeric forms, in which hydrogen atoms are transposed to other parts of the molecules and the chemical bonds between the atoms of the molecules are consequently rearranged. It should be understood that all tautomeric forms, in so far as they may exist, are included within this disclosure. Additionally, the compounds disclosed herein can exist in unsolvated as well as solvated forms with pharmaceutically acceptable solvents such as water, ethanol, and the like: all componentry to the present disclosure. The present disclosure is not limited to any particular mechanism, nor to any understanding of the action of the agent(s) being administered.

[1523] When a chiral center(s) exists in a compound of this disclosure, it is to be understood that this disclosure encompasses all possible stereoisomers. Each stereogenic carbon or sulfur may be of R or S configuration. Although the specific compounds exemplified in this disclosure may be depicted in a particular configuration, compounds having the opposite stereochemistry at any given chiral center, or mixtures thereof, are also envisioned.

[1524] When epimerization is relevant in vivo, administering an enantiomeric excess of one stereoisomer to a subject in order to administer the opposite stereoisomer to this same subject is contemplated by, and componentry to, this disclosure. Administering an enantiomeric excess of a stereoisomer to administer an effective amount of the opposite stereoisomer is contemplated by, and componentry to, this disclosure. For example, one of the art will recognize that administration of a compound in its (R) form is partially/fully equivalent, for compounds that undergo R to S epimerization in vivo, to administration of the compound in its(S) form.

[1525] The present disclosure includes all isotopes of all atoms occurring in the present compounds. So, this disclosure embraces isotopically labeled compounds of the disclosure which are identical to those recited herein, except that one or more atoms are replaced by an atom having an atomic mass and/or mass number different from the atomic mass and/or mass number usually found in nature. Isotopes include those atoms having the same atomic number but different mass numbers. By way of general example and without limitation, examples of isotopes that can be incorporated into compounds of this disclosure include isotopes of hydrogen, carbon, nitrogen, oxygen, phosphorus, sulfur, fluorine and chlorine, such as ²H, ³H, ¹³C, ¹⁴C, ¹⁵N, ¹⁷O, ¹⁸O, ³¹P, ³²P, ³³S, ³⁴S, ³⁵S, ³⁶S, ¹⁸F, and ³⁶Cl, respectively. Isotopically labeled compounds of the present disclosure can generally be prepared by following procedures analogous to those disclosed herein by substituting an isotopically labeled reagent for a non-isotopically labeled reagent. Such isotopically labeled compounds may be useful in metabolic studies, reaction kinetic studies, detection or imaging techniques, such as positron emission tomography (PET) or single-photon emission computed tomography (SPECT) including drug or substrate tissue distribution assays or in radioactive treatment of subjects (e.g. humans). Substitution with positron emitting isotopes, such as ¹¹C, ¹⁸F, ¹⁵O and ¹³N, can be useful in PET studies for examining substrate receptor occupancy. These radiolabeled compounds can be useful to further determine or measure the effectiveness of the compounds, by characterizing, for example, the site/mode of action, or binding affinity to pharmacologically important site of action. Substitution with heavier isotopes such as deuterium, i.e., ²H, may afford certain therapeutic advantages resulting from greater metabolic stability, for example, increased in vivo half-life or reduced dosage requirements, and hence may be preferred in some circumstances. Also provided for isotopically labeled compounds described herein are any pharmaceutically acceptable salts, solvates, hydrates or prodrugs, as the case may be.

[1526] In cases wherein there are nitrogen atoms (e.g., amines) on compounds of the present disclosure, these may be converted to N-oxides by treatment with an oxidizing agent (e.g., mCPBA and/or hydrogen peroxides) to afford other compounds of this disclosure. Thus, shown/claimed nitrogen atoms are considered to cover both the shown nitrogen and its N-oxide (N→O) derivative.

[1527] Membrane permeant derivatives of the compounds of this disclosure are contemplated by and componentry to this disclosure. “Membrane permeant derivative” refers to a chemical derivative of a compound that increases the membrane permeability of the compound. These derivatives are made better able to cross cell membranes because hydrophilic groups are masked to provide more hydrophobic derivatives. Also, the masking groups can be designed to be cleaved from the compound within a cell to make the compound more hydrophilic once within the cell. Because the compound is more hydrophilic than its membrane permeant derivative, it preferentially localizes within the cell (U.S. Pat. No. 5,741,657).

[1528] Any metabolite of a compound of this disclosure is a compound of this disclosure. Componentry to this disclosure is any compound of this disclosure, optionally a compound of Formula (I), (II), (III), (IV), (V), (VI), (VII), (VIII), [X], herein, with one or more of its H atoms/isotopes replaced with OH (hydroxyl), for example catalysed/enabled by an enzyme e.g. one or more of a Cytochorome P450 enzyme(s), monoxygenase enzyme(s), hydroxylase enzyme(s) and/or by other relevant enzyme(s) known to those of the art. Optionally, but not restrictively, such a compound(s) of this disclosure can be produced by incubating a compound(s) of this disclosure with microsomes, optionally liver microsomes, wherein this technique is well known to those of the art.

[1529] Reference to a compound(s) of Formula (I), (II), (III), (IV), (V), (VI), (VII), (VIII), [X], herein is understood to include reference to every tautomer, enantiomer, mixture of enantiomers, salt, solvate, hydrate, prodrug, chemically protected form, ester, N-oxide, metabolite, crystal, polymorph, co-crystal, clathrate thereof, unless otherwise indicated.

### Salts & Solvates

[1530] Throughout the specification, groups and substituents thereof may be chosen by one skilled in the field to provide stable moieties and compounds.

[1531] The compounds of Formula [X] form salts which are also within the scope of this disclosure. Reference to a compound of the Formula [X] herein is understood to include reference to salts thereof, unless otherwise indicated. For illustrating, not restricting, example: quaternary ammonium salts of compounds of Formula [X] are componentry to the present disclosure. Generally speaking, salts tend to be more soluble in aqueous or other protonic solvents than are the corresponding free base forms.

[1532] The phrase “pharmaceutically acceptable” is employed herein to refer to those compounds, materials, compositions, and/or dosage forms that are, within the scope of sound medical judgment, suitable for use in contact with the tissues of human beings and animals without excessive toxicity, irritation, allergic response, immunogenicity, and/or other problem or complication, commensurate with a reasonable benefit/risk ratio.

[1533] As used herein, the term “pharmaceutically acceptable salt” refers to any pharmaceutically acceptable salt (e.g., acid or base) of a compound of the present disclosure which, upon administration to a subject, is capable of providing a compound of this disclosure or an active metabolite or residue thereof. As is known to those of ordinary skill in the art, “salts” of the compounds of the present disclosure may be derived from inorganic or organic acids and bases. For therapeutic use, salts of the compounds of the present disclosure are contemplated as being pharmaceutically acceptable (i.e., non-toxic, physiologically acceptable). However, salts of acids and bases that are non-pharmaceutically acceptable may also find use, for example, in the preparation, isolation or purification of a pharmaceutically acceptable compound. Lists of suitable salts are found in Remington's Pharmaceutical Sciences, 18^{th} Edition, Mack Publishing Company, Easton, Pa. (1990) and Handbook of Pharmaceutical Salts: Properties, Selection, and Use by Stahl and Wermuth (Wiley-VCH, 2002) and refer Berge et al. (1977) “Pharmaceutical Salts”, J. Pharm. Sci. 66:1-19, all hereby incorporated by reference.

[1534] The term “salt(s)”, as employed herein, denotes acidic and/or basic salts formed with inorganic and/or organic acids and bases. In addition, when a compound of Formula [x] contains both a basic moiety, such as, but not limited to an amine or a pyridine or imidazole ring, and an acidic moiety, such as, but not limited to a carboxylic acid, zwitterions (“inner salts”) may be formed and are included within the term “salt(s)” as used herein.

[1535] Salts can be prepared in situ during the final isolation and purification of the compounds of this disclosure, or by separately reacting a purified compound of this disclosure in its free base form with a suitable organic or inorganic acid, and isolating the salt thus formed. Salts of the compounds of the Formula [X] may be formed, for example, by reacting a compound of the Formula [X] with an amount of acid or base, such as an equivalent amount, in a medium such as one in which the salt precipitates or in an aqueous medium followed by lyophilization.

[1536] The compounds of Formula [X] which contain a basic moiety, such as, but not limited to an amine or a pyridine or imidazole ring, may form salts with a variety of organic and inorganic acids. Exemplary acid addition salts include acetates (such as those formed with acetic acid or trihalo acetic acid, for example, trifluoroacetic acid), adipates, alginates, ascorbates, aspartates, benzoates, benzenesulfonates, bisulfates, borates, butyrates, citrates, camphorates, camphorsulfonates, cyclopentanepropionates, digluconates, dodecylsulfates, ethanesulfonates, fumarates, glucoheptanoates, glycerophosphates, hemisulfates, heptanoates, hexanoates, hydrochlorides (formed with hydrochloric acid), hydrobromides (formed with hydrogen bromide), hydroiodides, 2-hydroxyethanesulfonates, lactates, maleates (formed with maleic acid), methane-sulfonates (formed with methanesulfonic acid), 2-naphthalenesulfonates, nicotinates, nitrates, oxalates, pectinates, persulfates, 3-phenylpropionates, phosphates, picrates, pivalates, propionates, salicylates, succinates, sulfates (such as those formed with sulfuric acid), sulfonates (such as those mentioned herein), tartrates, thiocyanates, toluenesulfonates such as tosylates, undecanoates, and the like.

[1537] The compounds of Formula [X] which contain an acidic moiety, such as, but not limited to a carboxylic acid, may form salts with a variety of organic and inorganic bases. Exemplary basic salts include ammonium salts, alkali metal salts such as sodium, lithium, and potassium salts, alkaline earth metal salts such as calcium and magnesium salts, salts with organic bases (for example, organic amines) such as benzathines, dicyclohexylamines, hydrabamines [formed with N,N-bis (dehydro-abietyl)ethylenediamine], N-methyl D-glucamines, N-methyl-D-glucamides, t-butyl amines, and salts with amino acids such as arginine, lysine and the like. Basic nitrogen-containing groups may be quaternized with agents such as lower alkyl halides (e.g., methyl, ethyl, propyl, and butyl chlorides, bromides and iodides), dialkyl sulfates (e.g., dimethyl, diethyl, dibutyl, and diamyl sulfates), long chain halides (e. g., decyl, lauryl, myristyl and stearyl chlorides, bromides and iodides), aralkyl halides (e.g., benzyl and phenethyl bromides), and others.

[1538] Exemplary salts include FDA/EMA approved salts for pharmaceutical use.

[1539] Compounds of Formula [X], and salts thereof, may exist in their tautomeric form (for example, as an amide or imino ether). All such tautomeric forms are contemplated herein as part of the present disclosure.

[1540] It should be understood that solvates (e.g., hydrates) of a compound(s) of Formula [X] are also within the scope of the present disclosure. Herein, the term “solvate” means a compound provided herein or a salt thereof that further includes a stoichiometric or non-stoichiometric amount of solvent (organic or inorganic) bound by non-covalent intermolecular forces (e.g. hydrogen bonding). Where the solvent is water, the solvate is a hydrate. In certain instances the solvate will be capable of isolation, for example when one or more solvent molecules are incorporated in the crystal lattice of the crystalline solid. The solvent molecules in the solvate may be present in a regular arrangement and/or a non-ordered arrangement. The solvate may comprise either a stoichiometric or nonstoichiometric amount of the solvent molecules. “Solvate” encompasses both solution-phase and isolable solvates. Exemplary solvates include, but are not limited to, hydrates, ethanolates, methanolates, and isopropanolates. Methods of solvation are known in the art.

[1541] Chelates, metal complexes (metal complexes include calcium, zinc, iron and the like), mixtures, radionuclides and liposomes of Formula [X] are within the scope of this disclosure. In some embodiments, a compound(s) of Formula [X] is anhydrous.

### Fatty Acids

[1542] In an embodiment, a therapeutic compound(s) componentry to the present disclosure, for example a compound(s) of Formula [X], is formulated with a pharmaceutically-acceptable fatty acid(s). In an embodiment, the stoichiometry of a compound of Formula [X] to a fatty acid is 1:1, in another embodiment it is 1:2, and in other embodiments it is other stoichiometries/ratios. What constitutes a fatty acid is well known to those of the art, and isn't necessarily limited to the brief specification given herein. A fatty acid is a carboxylic acid with an aliphatic chain, which is either saturated (no C═C double bonds; in some cases with a formula CH₃(CH₂)ₙCOOH where n is a positive integer) or unsaturated (with one or more C═C double bonds, each of which can be in a cis or trans configuration; monounsaturated fatty acids have a single C═C double bond, polyunsaturated fatty acids (PUFA) have more than one C═C double bond, methylene-interrupted polyenes have two or more cis double bonds separated from each other by a single methylene bridge (—CH₂—) (i.e. C═C—C—C═C), conjugated fatty acids have at least one pair of double bonds separated by only a single bond (i.e. C═C—C═C)), which is either branched or (more typically) unbranched, which is optionally substituted. This arrangement confers a fatty acid with a polar, hydrophilic end, and a nonpolar, hydrophobic end that is insoluble in water. Most naturally occurring fatty acids have an unbranched hydrocarbon chain of an even number of carbon atoms, typically between 4 and 28 carbons, and may be attached to functional groups containing oxygen, halogens, nitrogen, and sulfur. Synthetic or non-natural fatty acids may have a hydrocarbon chain of any number of carbon atoms from between 3 and 40 carbons. Where a double bond exists, there is the possibility of either cis or trans geometric isomerism (=E/Z isomerism in IUPAC nomenclature), which significantly affects the molecule's molecular configuration. Cis-double bonds cause the fatty acid chain to bend, an effect that is more pronounced the more cis double bonds there are in a chain. Most naturally occurring fatty acids are of the cis configuration, although the trans form does exist in some natural and partially hydrogenated fats and oils, wherein trans fats have been associated with increased risk of coronary heart disease. Omega (Φ) is the name for the methyl end of a fatty acid and, starting from the omega end, omega-3 (ω-3 or n-3) fatty acids have their first (in some cases only) double bond between the 3^{rd} and 4^{th} carbon atoms from the methyl end, omega-6 (ω-6 or n-6) fatty acids have their first (in some cases only) double bond between the 6^{th} and 7^{th} carbon atoms from the methyl end, omega-7 (ω-7 or n-7) fatty acids have their first (in some cases only) double bond between the 7^{th} and 8^{th} carbon atoms from the methyl end, omega-9 (ω-9 or n-9) fatty acids have their first (in some cases only) double bond between the 9^{th} and 10^{th} carbon atoms from the methyl end. In naming fatty acids a form used is, to illustrate with an example, (18:3, n-3), wherein this fatty acid has 18 carbons in its aliphatic chain, 3 double bonds, the first of which emanates from the 3^{rd} carbon from the methyl (omega, w) end of the chain (i.e. this is an omega-3 fatty acid). To give a further example, (20:5, n-3), wherein this fatty acid has 20 carbons in its aliphatic chain, 5 double bonds, the first of which emanates from the 3^{rd} carbon from the methyl (omega, w) end of the chain (i.e. this is an omega-3 fatty acid). To give yet a further example, (20:3, n-9), wherein this fatty acid has 20 carbons in its aliphatic chain, 3 double bonds, the first of which emanates from the 9^{th} carbon from the methyl (omega, @) end of the chain (i.e. this is an omega-9 fatty acid). Note that these examples haven't been fully specified using this notation because the cis/trans (E/Z) isomerism of their double bond(s) hasn't been specified. Also, note that this naming system is not what is specified by IUPAC, where for one thing, carbons are counted from the carboxyl rather than the methyl end of the aliphatic chain. α-Linolenic acid (ALA) is (18:3, n-3) and in IUPAC nomenclature: (9Z,12Z,15Z)-9,12,15-Octadecatrienoic acid, wherein this fatty acid has 3 double bonds, all Z configuration, at carbons 9, 12, 15 from the carboxyl end, wherein (to revert back away from IUPAC) its first double bond emanates from the 3^{rd} carbon atom from the methyl end.

[1543] Examples of fatty acids include, without limitation, Capryllic acid, Caprylic acid, pelargonic acid, Capric acid. Undecylic acid, Lauric acid, Tridecylic acid, Myristic acid, Myristoleic acid, Pentadecyclic acid, Palmitic acid, Palmitoleic acid, Sapienic acid, Margaric acid, Stearic acid, Oleic acid, Elaidic acid, Vaccenic acid, Linoleic acid, Linoelaidic acid, α-Linolenic acid, γ-Linolenic acid, Stearidonic acid, Nonadecylic acid, Arachidic acid, Eicosenoic acid, 11-Eicosenoic acid, Dihomo-γ-linolenic acid, Mead acid, Arachidonic acid, Eicosapentaenoic acid, Heneicosylic acid, Behenic acid, Erucic acid, Docosahexaenoic acid, Tricosylic acid, Lignoceric acid, Nervonic acid, Pentacosylic acid, Cerotic acid, Heptacosylic acid, Montanic acid, Nonacosylic acid, Melissic acid, Henatriacontylic acid, Lacceroic acid, Psyllic acid, Geddic acid, Ceroplastic acid, and Hexatriacontylic acid, α-Linolenic acid, γ-Linolenic acid, omega 3 fatty acid (ALA), omega 3 fatty acid (DHA), omega 3 fatty acid (EPA), omega 6 fatty acid (AA), omega 7 fatty acid (CLA), omega 9 fatty acid (OA), omega 9 hydroxylated fatty acid (R_{A}), Arachidonic acid, [9Z, 11E conjugated Linoleic acid], conjugated linoleic acid, conjugated (9Z,11E)-Linoleic acid (CAS Number 2540-56-9), Docosahexaenoic acid, Eicosapentaenoic acid, Oleic acid, Ricinoleic acid, butyric acid, hexanoic acid, decanoic acid, valeric acid, pentadecan acid, heptanoic acid, docosatetraenoic acid, heptadecanoic acid, paullinic acid, alpha-parinaric acid, calendic acid, docosapentaenoic acid, linolelaidic acid, gadoleic acid, alpha-Eleostearic acid, petroselinic acid, punicic acid, pinolenic acid, rumenic acid, eicosatetraenoic acid, tuberculostearic acid, vernolic acid, prostanoic acid, catalpic acid, jacaric acid, malvalic acid, aleuritic acid, lesquerolic acid, bosseopentaenoic acid, hydnocarpic acid.

[1544] In aspects of this embodiment, a saturated or unsaturated fatty acid comprises, e.g., at least 8, at least 10, at least 12, at least 14, at least 16, at least 18, at least 20, at least 22, at least 24, at least 26, at least 28, or at least 30 carbon atoms. In other aspects of this embodiment, a saturated or unsaturated fatty acid comprises, e.g., between 4 and 24 carbon atoms, between 6 and 24 carbon atoms, between 8 and 24 carbon atoms, between 10 and 24 carbon atoms, between 12 and 24 carbon atoms, between 14 and 24 carbon atoms, or between 16 and 24 carbon atoms, between 4 and 22 carbon atoms, between 6 and 22 carbon atoms, between 8 and 22 carbon atoms, between 10 and 22 carbon atoms, between 12 and 22 carbon atoms, between 14 and 22 carbon atoms, or between 16 and 22 carbon atoms, between 4 and 20 carbon atoms, between 6 and 20 carbon atoms, between 8 and 20 carbon atoms, between 10 and 20 carbon atoms, between 12 and 20 carbon atoms, between 14 and 20 carbon atoms, or between 16 and 20 carbon atoms. If unsaturated, the fatty acid may have, e.g., 1 or more, 2 or more, 3 or more, 4 or more, 5 or more, or 6 or more double bonds.

[1545] In another embodiment, an adjuvant may comprise one kind of pharmaceutically-acceptable fatty acid. In another embodiment, an adjuvant may comprise a plurality of different pharmaceutically-acceptable fatty acids. In aspects of this embodiment, an adjuvant may comprise, e.g., two or more different fatty acids, three or more different fatty acids, four or more different fatty acids, five or more different fatty acids, or six or more different fatty acids.

[1546] A pharmaceutically-acceptable fatty acid useful in the pharmaceutical compositions disclosed herein may be a pharmaceutically-acceptable omega fatty acid. Non-limiting examples of an omega fatty acid include an omega-3 fatty acid, an omega-6 fatty acid, an omega-7 fatty acid, an omega-9 fatty acid.

[1547] Omega-3 fatty acids (also known as n-3 fatty acids or ω-3 fatty acids) are a family of unsaturated fatty acids that have in common a final carbon-carbon double bond in the n-3 position, that is, the third bond, counting from the methyl end of the fatty acid. Omega-3 fatty acids are “essential” fatty acids because they are vital for normal metabolism and cannot be synthesized by the human body. An omega-3 fatty acid includes, without limitation, Hexadecatrienoic acid (16:3), α-Linolenic acid (18:3), Stearidonic acid (18:4), Eicosatrienoic acid (20:3), Eicosatetraenoic acid (20:4), Eicosapentaenoic acid (20:5), Heneicosapentaenoic acid (21:5), Docosapentaenoic acid (Clupanodonic acid) (22:5), Docosahexaenoic acid (22:6), Tetracosapentaenoic acid (24:5), Tetracosahexaenoic acid (Nisinic acid) (24:6).

[1548] Omega-6 fatty acids (also known as n-6 fatty acids or ω-6 fatty acids) are a family of unsaturated fatty acids that have in common a final carbon-carbon double bond in the n-6 position, that is, the sixth bond, counting from the methyl end of the fatty acid. An omega-6 fatty acid includes, without limitation, Linoleic acid (18:2), γ-linolenic acid (18:3), Calendic acid (18:3), Eicosadienoic acid (20:2), Dihomo-γ-linolenic acid (20:3), Arachidonic acid (20:4), Docosadienoic acid (22:2), Adrenic acid (22:4). Docosapentaenoic acid (22:5), Tetracosatetraenoic acid (24:4), and Tetracosapentaenoic acid (24:5).

[1549] Omega-7 fatty acids (also known as n-7 fatty acids or ω-7 fatty acids) are a family of unsaturated fatty acids that have in common a final carbon-carbon double bond in the n-7 position, that is, the seventh bond, counting from the methyl end of the fatty acid. An omega-7 fatty acid includes, without limitation, 5-Dodecenoic acid (12:1), 7-Tetradecenoic acid (14:1), 9-Hexadecenoic acid (Palmitoleic acid) (16:1), 11-Decenoic acid (Vaccenic acid) (18:1), 9Z, 11E conjugated Linoleic acid (Rumenic acid) (18:2), 13-Eicosenoic acid (Paullinic acid) (20:1), 15-Docosenoic acid (22:1), and 17-Tetracosenoic acid (24:1).

[1550] Omega-9 fatty acids (also known as n-9 fatty acids or ω-9 fatty acids) are a family of unsaturated fatty acids that have in common a final carbon-carbon double bond in the n-9 position, that is, the ninth bond, counting from the methyl end of the fatty acid. An omega-9 fatty acid includes, without limitation, Oleic acid (18:1), Elaidic acid (18:1), Eicosenoic acid (20:1), Mead acid (20:3), Erucic acid (22:1), Nervonic acid (24:1), Ricinoleic acid, ximenic acid (26:1).

[1551] A pharmaceutically-acceptable fatty acid useful in the pharmaceutical compositions disclosed herein may be a pharmaceutically-acceptable conjugated fatty acid. Conjugated fatty acids are positional and geometric isomers of polyunsaturated fatty acids in which at least one pair of double bonds are separated by only one single bond. In one aspect of this embodiment, a pharmaceutically-acceptable conjugated fatty acid is, e.g., a C16 conjugated fatty acid, a C18 conjugated fatty acid, a C20 conjugated fatty acid, a C22 conjugated fatty acid, a C24 conjugated fatty acid, a C26 conjugated fatty acid, a C28 conjugated fatty acid or a C30 conjugated fatty acid. In one aspect of this embodiment, pharmaceutically-acceptable conjugated fatty acid is, e.g., a C16-C18 conjugated fatty acid, a C16-C20 conjugated fatty acid, a C16-C22 conjugated fatty acid, a C16-C24 conjugated fatty acid, a C16-C26 conjugated fatty acid, a C16-C28 conjugated fatty acid, a C16-C30 conjugated fatty acid, a C18-C20 conjugated fatty acid, a C18-C22 conjugated fatty acid, a C18-C24 conjugated fatty acid, a C18-C26 conjugated fatty acid, a C18-C28 conjugated fatty acid, a C18-C30 conjugated fatty acid, a C20-C22 conjugated fatty acid, a C20-C24 conjugated fatty acid, a C20-C26 conjugated fatty acid, a C20-C28 conjugated fatty acid, a C20-C30 conjugated fatty acid, a C22-C24 conjugated fatty acid, a C22-C26 conjugated fatty acid, a C22-C28 conjugated fatty acid, a C22-C30 conjugated fatty acid, a C24-C26 conjugated fatty acid, a C24-C28 conjugated fatty acid, a C24-C30 conjugated fatty acid, a C26-C28 conjugated fatty acid, a C26-C30 conjugated fatty acid, or C28-C30 conjugated fatty acid.

[1552] In another aspect of this embodiment, a pharmaceutically acceptable conjugated fatty acid includes, e.g., a conjugated Linoleic acid, a conjugated Linoelaidic acid, a conjugated α-Linolenic acid, a conjugated γ-Linolenic acid, a conjugated Calendic acid, a conjugated Eicosadienoic acid, a conjugated Stearidonic acid, a conjugated Nonadecylic acid, a conjugated Arachidic acid, a conjugated Dihomo-γ-linolenic acid, a conjugated DocoSadienoic, a conjugated Mead acid, a conjugated Arachidonic acid, a conjugated Eicosapentaenoic acid, a conjugated Adrenic acid, a conjugated Docosapentaenoic acid, a conjugated Heneicosylic acid, a conjugated Tetracosatetraenoic acid, a conjugated Tetracosapentaenoic acid, a conjugated Behenic acid, a conjugated Docosahexaenoic acid, a conjugated Tricosylic acid, a conjugated Lignoceric acid, a conjugated Pentacosylic acid, a conjugated Cerotic acid, a conjugated Heptacosylic acid, a conjugated Montanic acid, a conjugated Nonacosylic acid, a conjugated Melissic acid, a conjugated Henatriacontylic acid, a conjugated Lacceroic acid, a conjugated Psyllic acid, a conjugated Geddic acid, a conjugated Ceroplastic acid, a conjugated Hexatriacontylic acid, or any combination thereof.

[1553] A pharmaceutically-acceptable fatty acid useful in the pharmaceutical compositions disclosed herein may be a pharmaceutically-acceptable conjugated linoleic acid (CLA). Conjugated linoleic acid (CLA) refers to a group of at least 28 positional and geometric isomers of the omega-6 essential fatty acid linoleic acid (cis-9, cis-12, octadecadienoic acid). The double bonds of CLAS are conjugated, with only one single bond between them. Virtually all cis- and trans-isomeric combinations of CLA have been identified. A CLA includes, without limitation, cis-9, trans-11, octadecadienoic acid (c-9, t-11 CLA), cis-9, cis-11, octadecadienoic acid (c-9, c-11 CLA), trans-9, trans-11, octadecadienoic acid (t-9, t-11 CLA), and trans-9, cis-11, octadecadienoic acid (t-9, c-11 CLA), cis-9, trans-11, conjugated linoleic acid (c-9, t-11 CLA), cis-9, cis 11, conjugated linoleic acid (c-9, c-11 CLA), trans-9, trans 11, conjugated linoleic acid (t-9, t-11 CLA), and trans-9, cis-11, conjugated linoleic acid (t-9, c-11 CLA), cis-10, trans 12, conjugated linoleic acid (c-10, t-12 CLA), cis-10, cis-12, conjugated linoleic acid (c-10, c-12 CLA), trans-10, trans-12, conjugated linoleic acid (t-10, t-12 CLA), and trans-10, cis 12, conjugated linoleic acid (t-10, c-12 CLA), and any combination thereof.

[1554] In an aspect of this embodiment, a pharmaceutical composition comprises a compound(s) of Formula [X] and an Omega-3 fatty acid(s). In another aspect of this embodiment, a pharmaceutical composition comprises a compound(s) of Formula [X] and an Omega-6 fatty acid(s). In yet another aspect of this embodiment, a pharmaceutical composition comprises a compound(s) of Formula [X] and an Omega-7 fatty acid(s). In still another aspect of this embodiment, a pharmaceutical composition comprises a compound(s) of Formula [X] and an Omega-9 fatty acid(s). In other aspects, a pharmaceutical composition comprises a compound(s) of Formula [X] and an Omega-3 fatty acid, an Omega-6 fatty acid, an Omega-7 fatty acid, an Omega-9 fatty acid, or any combination thereof. In yet other aspects, a pharmaceutical composition comprises a compound(s) of Formula [X] and C-Linolenic acid, Arachidonic acid, Docosahexaenoic acid, Rumenic acid, or any combination thereof.

[1555] In some embodiments, contemplated is a pharmaceutical composition that comprises (or consists of) at least one compound of Formula [X] conjoined (e.g. covalently bound) to at least one fatty acid (optionally a fatty acid(s) listed herein).

[1556] In an embodiment, a pharmaceutical composition comprises one or more compounds of Formula [X] and one or more of a fatty acid(s), wherein the fatty acid is an omega-3 fatty acid, an omega-6 fatty acid, an omega-7 fatty acid, an omega-9 fatty acid, or any combination thereof, wherein (if present) the omega-3 fatty acid is Hexadecatrienoic acid (16:3), C-Linolenic acid (18:3), Stearidonic acid (18:4), Eicosa trienoic acid (20:3), Eicosatetraenoic acid (20:4), Eicosa pentaenoic acid (20:5), Heneicosapentaenoic acid (21:5), Docosapentaenoic acid (Clupanodonic acid) (22:5), Docosahexaenoic acid (22:6), Tetracosapentaenoic acid (24:5), Tetracosahexaenoic acid (Nisinic acid) (24:6), or any combination thereof, wherein (if present) the omega-6 fatty acid is Linoleic acid (18:2), Y-linolenic acid (18:3), Calendic acid (18:3), Eicosadienoic acid (20:2), Dihomo-y-linolenic acid (20:3), Arachidonic acid (20:4), Docosadienoic acid (22:2), Adrenic acid (22:4).Docosapentaenoic acid (22:5), Tetracosatetraenoic acid (24:4), and Tetracosapentaenoic acid (24:5), or any combination thereof, wherein (if present) the omega-7 fatty acid is 5-Dodecenoic acid, 7-Tetradecenoic acid, 9-Hexadecenoic acid (Palmitoleic acid), 11-Decenoic acid (Vaccenic acid), 13-Eicosenoic acid (Paullinic acid), 15-Docosenoic acid, 17-Tetracosenoic acid, and 9Z,11E conjugated Linoleic acid (Rumenic acid), or any combination thereof, wherein (if present) the omega-9 fatty acid Oleic acid, Elaidic acid, Eicosenoic acid, Meadacid, Erucic acid, Nervonic acid, and Ricinoleic acid, or any combination thereof.

[1557] In an embodiment, a pharmaceutical composition comprises one or more compounds of Formula [X] and one or more of a fatty acid, plus optionally a chemotherapeutic and/or anti-proliferative agent(s) and/or one or more compounds approved for human use, optionally for anti-cancer use, by the United States Food and Drug Administration (FDA) and/or European Medicines Agency (EMA). Optionally, further/alternative constituent(s) are componentry to this composition, wherein the range of options is clear to someone of the art, some of which are disclosed elsewhere herein, and include (without limitation) pharmaceutically-acceptable carriers include vehicles, stabilizers, diluents, additives, auxiliarys or excipients, including buffers, preservatives, tonicity adjusters, salts, demulcents, antioxidants, osmolality adjusting agents, physiological substances, pharmacological substances, bulking agents, emulsifying agents, wetting agents, flavoring agents, or coloring agents, a therapeutically effective amount of a chemotherapeutic or anti-proliferative agent(s), wherein the chemotherapeutic or anti-proliferative agent(s) is selected from the group consisting of an alkylating agent, a platinum agent, an antimetabolite, a topoisomerase inhibitor, an antitumor antibiotic, an aromatase inhibitor, a thymidylate synthase inhibitor, a DNA antagonist, farnesyltransferase inhibitor, a pump inhibitor, a metalloproteinase inhibitor, a ribonucleoside reductase inhibitor, a TNFC, agonist, an endothelin A receptor antagonist, a retinoic acid receptoragonist, an immuno-modulator, a hormonal and antihormonal agent, a photodynamic agent, a tyrosine kinase inhibitor, and any combination thereof.

[1558] An aspect of this disclosure is to use a composition(s) componentry to this disclosure, for (non-limiting) example a composition containing a compound(s) of Formula [X] and a fatty acid(s), in a method of treatment of the human or animal body by therapy, for (non-limiting) example to treat/ameliorate/prevent/combat one or more of the diseases/disorders/pathologies/damages/processes mentioned herein, including (non-limiting) aging, signs of aging, diseases of aging, cancer and cachexia. A yet further aspect is to use a composition componentry to this disclosure, for (non-limiting) example a composition containing a compound(s) of Formula [X] and a fatty acid(s), for the manufacture of a medicament for the treatment/amelioration/prevention/combat of body damage, aging and/or a disease/disorder/pathology and/or to enhance/improve body/brain function, optionally for one or more of the therapeutic/beneficial/desirable applications mentioned herein, optionally cancer.

[1559] Fatty acids can have anti-cancer activity (e.g. refer [185-186]). In an embodiment, when formulating a composition of a compound(s) of Formula [X] and a fatty acid(s), if this composition is to be used for an anti-cancer use, the fatty acid(s) selected should, in a preferred embodiment, be a fatty acid(s) with the greatest anti-cancer activity, especially the fatty acid(s) with the greatest anti-cancer activity at the dosage used. In especially preferred composition embodiments the anti-cancer activity of a compound(s) of Formula [X] and a fatty acid(s) synergize.

[1560] A disclosure embodiment is a pharmaceutical composition comprising a therapeutically effective amount of a compound(s) of Formula [X] and 9Z,11E conjugated linoleic acid, optionally in a 1:1 ratio.

### Prodrugs

[1561] In addition, compounds of the Formulas [X] may have prodrug forms. Any compound that will be converted or react under biological conditions, e.g. in vivo, to provide the bioactive agent (i.e., a compound of Formula [X]) is a prodrug within the scope and spirit of this disclosure. For example, a derivative of a compound of Formula [X] that can hydrolyze, oxidize, or otherwise react under biological conditions to provide a compound of Formula [X]. For example, prodrug compounds of Formula [X] may be carboxylate ester moieties. A carboxylate ester may be conveniently formed by esterifying any of the carboxylic acid functionalities found on the disclosed structure(s). For example, prodrug compounds of Formula [X] comprise biohydrolyzable moieties such as biohydrolyzable amides, biohydrolyzable esters, biohydrolyzable carbamates, biohydrolyzable carbonates, biohydrolyzable ureides, and biohydrolyzable phosphate analogues. Other examples of prodrugs include derivatives of a compound of Formula [X] that comprise —NO, —NO₂, —ONO, or —ONO₂ moieties. Various forms of prodrugs are well known in the art. For introductory teaching in this area, see:
[1562] a) Design of Prodrugs, edited by H. Bundgaard, (Elsevier, 1985), and Methods in Enzymology, Vol. 42, p. 309-396, edited by K. Widder, et. al. (Academic Press, 1985);
[1563] b) A Textbook of Drug Design and Development, edited by Krosgaard-Larsen and H. Bundgaard, Chapter 5, “Design and Application of Prodrugs,” by H. Bundgaard, p. 113-191(1991);
[1564] c) H. Bundgaard, Advanced Drug Delivery Reviews, Vol. 8, p. 1-38(1992);
[1565] d) H. Bundgaard, et al., Journal of Pharmaceutical Sciences, Vol. 77, p. 285(1988); and
[1566] e) N. Kakeya, et. al., Chem Phar Bull, Vol. 32, p. 692(1984).
[1567] f) Burger's Medicinal Chemistry and Drug Discovery, 172-178, 949-982 (Manfred E. Wolff ed., 5^{th} ed. 1995)
[1568] g) Medicinal Chemistry: Principles and Practice, King, F. D., ed. The Royal Society of Chemistry, Cambridge, UK (1994); Testa, B. et al., Hydrolysis in Drug and Prodrug Metabolism. Chemistry, Biochemistry and Enzymology, VCHA and Wiley-VCH, Zurich, Switzerland (2003); The Practice of Medicinal Chemistry, Wermuth, C. G., ed., Academic Press, San Diego, Calif. (1999); Pro-drugs as Novel Delivery Systems, Vol. 14, ACS Symposium Series (T. Higuchi and W. Stella) and Bioreversible Carriers in Drug Design, Pergamon Press, 1987 (Ed. E. B. Roche, American Pharmaceutical Association); Prodrugs: Challenges and Reward, edited by Valentino Stella, Ronald Borchardt, Michael Hageman, Reza Oliyai, Hans Maag, Jefferson Tilley, (Springer, 2007).

[1569] Prodrugs include compounds of this disclosure wherein a hydroxy, amino or mercapto group is bonded to any group that, when the prodrug of the compound of this disclosure is administered to a mammalian subject, cleaves to form a free hydroxy, free amino or free mercapto group, respectively. Examples of prodrugs include, but are not limited to, acetate, formate and benzoate derivatives of alcohol or amide derivatives of amine functional groups in the compounds of this disclosure and the like.

### Dosage

[1570] As used herein, the term “therapeutically effective amount” or “effective amount” refers to the amount of an administered compound sufficient to effect a beneficial or desired result(s) in the subject, e.g. prevents, reduces or eliminates a cause and/or symptom(s) of a disease/disorder, optionally in combination with other active compound(s). An effective amount can be administered in one or more administrations, applications or dosages and is not intended to be limited to a particular formulation or administration route.

[1571] The effective amount of a compound of the present disclosure may be determined and by one of ordinary skill in the art. The specific dose level and frequency of dosage for any particular subject may vary and will depend upon a variety of factors, including the activity of the specific compound employed, the metabolic stability and length of action of that compound, the pharmacokinetics of the compound, the formulation of compound used, the species, age, body weight, general health, medical condition, medical history, resilience, sex and diet of the subject, the mode/route and frequency of administration, rate of excretion, renal and hepatic function of patient, drug combination, concurrent treatment and type and severity/extent of the particular condition, nature/type/extent of presenting symptoms, the desired effect/outcome and/or the responsiveness/reaction of the subject. In an embodiment, a physician or veterinarian, optionally using their professional judgement, determines and prescribes the effective amount of the drug required. Broadly, small dosages may be used initially and, if necessary, increased by small increments until the desired effect under the circumstances is reached. The skilled practitioner is able to determine the appropriate dose based on factors disclosed herein and the effective dose derived from animal and clinical studies. Alternatively, or in addition, it may be determined empirically using known testing protocol(s) or by extrapolation from in vivo and/or in vitro test and/or diagnostic data. One skilled in the art using routine methods can determine effective dosage levels; that is, the dosage levels necessary to achieve the desired result. Typically, human clinical applications of products are commenced at lower dosage levels, with dosage level being increased until the desired effect is achieved. It is further understood that for any particular individual subject, specific dosage regimen can be adjusted over time according to the individual need and the professional judgment of the person(s) administering or supervising the administration of the compound(s)/composition(s).

[1572] An exemplary effective amount of compounds of Formula [X] may be within the dosage range of about 0.001 to about 300 mg/kg, preferably about 0.2 to about 50 mg/kg and more preferably about 0.5 to about 25 mg/kg (or from about 1 to about 2500 mg, preferably from about 5 to about 2000 mg), or from 1 microgram to 100 milligram per kilogram body weight per day, on a regimen in single or 2 to 6 (or more) divided daily doses (optionally administered at a specified interval), or weekly, monthly, yearly, once every 2 to 20 years, or only once, or administered in a continuous infusion for a period (all of the specific dosages which lie between the upper and lower dosages stated above are contemplated in the present disclosure). But more exactly it depends upon the compound used, the condition and its advancement/severity (e.g. the type and grade of cancer), the route of administration, type of dosing (e.g. pulse or consistent etc.), what other treatments are undertaken alongside or previously (e.g. chemotherapeutics, surgery, radiotherapy, immunotherapy etc.), the age, sex, condition, previous/other diseases of the patient, pharmacokinetics of compound in that patient, response to treatment and exceptions to this dosage range are contemplated by the present disclosure, and can be changed during treatment to find the optimum. Optimal dosage to be administered to a subject can be determined by those skilled in the art. Persons of ordinary skill in the art can estimate repetition rates for dosing based, in total or in part, on measured residence times and concentrations of the drug in bodily fluids or tissues. Clinical trials may be used to optimize the dose and dosing frequency for any particular compound, with subsequent further optimization for each particular subject by the direction of one of ordinary skill of the art e.g. a medical/veterinary practitioner. When the compounds described herein are co-administered with another agent, the effective amount may be less than when the agent is used alone.

[1573] Once improvement of the subject's disease/disorder/condition has occurred, the dose may be adjusted for preventative or maintenance treatment. For example, the dosage or the frequency of administration, or both, may be reduced as a function of the symptoms, to a level at which the desired therapeutic or prophylactic effect is maintained. Of course, if symptoms have been alleviated to an appropriate level, treatment may cease. Subject may, however, require intermittent treatment on a long-term basis upon any recurrence of symptoms. Subjects may also require chronic treatment on a long-term basis. The case wherein the subject's condition does not improve, upon the (e.g.) doctor's discretion the administration of the compounds may be administered chronically, that is, for an extended period of time, including throughout the duration of the subject's life in order to ameliorate or otherwise control or limit the symptoms of the subject's disease or condition.

[1574] In some embodiments, a human dose(s) can be extrapolated from an animal study/studies (e.g. refer Fingle and Woodbury, Chapter 1 in Goodman and Gilman's The Pharmacological Basis of Therapeutics, 5^{th} Ed., MacMillan Publishing Co., New York (1975), pages 1-46).

### Pharmaceutical Composition

[1575] While it is possible for a compound of the present disclosure to be administered alone, it is preferable to administer the compound as a pharmaceutical formulation/composition. The compound(s) of Formula [X], or an enantiomer or a mixture of enantiomers thereof; or a pharmaceutically acceptable salt, solvate, hydrate, prodrug, co-crystal, clathrate, or polymorph thereof, may be formulated, alone or together, in suitable dosage unit with pharmaceutically acceptable excipients, carriers, adjuvants and vehicles, appropriate for each route of administration.

[1576] The term “pharmaceutical composition” means a composition comprising a compound of this disclosure in combination with at least one additional pharmaceutically acceptable carrier, inert or active, making the composition especially suitable for diagnostic or therapeutic use in vivo. Disclosed is a pharmaceutical composition of a therapeutically effective amount of a compound(s) of Formula [X] or a pharmaceutically acceptable salt thereof, and one or more pharmaceutically acceptable carriers, additives and/or diluents. This can be manufactured by a method of the art including, but not restricted to, mixing, dissolving, granulating, dragee-making, levigating, emulsifying, encapsulating, entrapping, melt-spinning, spray-drying, or lyophilizing processes. Pharmaceutical compositions may be presented in unit dose forms containing a predetermined amount of active ingredient, e.g. a compound(s) of Formula [X], per unit dose.

[1577] A “pharmaceutically acceptable carrier” refers to media generally accepted in the art for the delivery of biologically active agents to animals, in particular, mammals, including (without limitation), i.e., adjuvant, excipient, carrier or vehicle, such as diluents, preserving agents, preservatives, stabalizers, fillers, flow regulating agents, disintegrating agents, encapsulating materials, coating agents, release agents, wetting agents, emulsifying agents, water, phosphate buffered saline solution, emulsions (e.g., such as an oil/water or water/oil emulsions), suspending agents, anti-oxidants, buffers, pH buffers, tonicity adjusters, osmolality adjusting agents, physiological substances, pharmacological substances, sweetening agents, flavoring agents, coloring agents, perfuming agents, bulking agents, antibacterial agents, antifungal agents, surfactants, humectants, absorbents, precipitation inhibitors, adsorbants, solution retarding agents, absorption delaying agents, solvents, anti-foaming agents, salivary stimulating agents, absorption accelerators, cooling agents, lubricating agents, viscosity enhancing agents, dispersion media, dispensing agents, and the like, depending on the nature of the mode of administration and dosage forms. Most preferably, but not restrictively, the chosen pharmaceutically acceptable vehicle(s) (e.g., carrier(s), adjuvant(s), and/or other excipient(s)) has met the required standards of toxicological and manufacturing testing and/or is included on the Inactive Ingredient Guide prepared by the U.S. Food and Drug administration. Pharmaceutically acceptable carriers are formulated according to a number of factors well within the purview of those of ordinary skill in the art. These include, without limitation: the type and nature of the active agent being formulated; the subject to which the agent-containing composition is to be administered; the intended route of administration of the composition; and the therapeutic indication being targeted. Pharmaceutically acceptable carriers include both aqueous and non-aqueous liquid media, as well as a variety of solid and semi-solid dosage forms. Such carriers can include a number of different ingredients and additives in addition to the active agent, such additional ingredients being included in the formulation for a variety of reasons, e.g., stabilization of the active agent, binders, etc., well known to those of ordinary skill in the art. Descriptions of suitable pharmaceutically acceptable carriers, and factors involved in their selection, are found in a variety of readily available sources such as, for example, Remington's Pharmaceutical Sciences, 18^{th} Ed. (1990) or Remington: The Science and Practice of Pharmacy, 22^{nd} Ed., Pharmaceutical Press (2013) or Introduction to Pharmaceutical Dosage Forms, 4^{th} ed., Lea & Febiger, Philadelphia (1985) or Handbook of Pharmaceutical Excipients (Raymond C. Rowe et al., APhA Publications, 4^{th} edition 2003) or Goodman & Gilman's The Pharmacological Basis of Therapeutics (Joel G. Hardman et al., eds., McGraw Hill Professional, 10^{th} ed. 2001, or 13^{th} ed. 2017) or Pharmaceutical Dosage Forms and Drug Delivery Systems (Howard C. Ansel et al., eds., Lippincott Williams & Wilkins Publishers, 7^{th} ed. 1999), Pharmaceutical Preformulation and Formulation (Gibson Ed., CRC Press LLC: Boca Raton, Fla., 2004), “Oral Lipid-Based Formulations: Enhancing the Bioavailability of Poorly Water-Soluble Drugs”, David J. Hauss, Informa Healthcare, 2007; and “Role of Lipid Excipients in Modifying Oral and Parenteral Drug Delivery: Basic Principles and Biological Examples” Kishor M. Wasan, ed. Wiley-Interscience, 2006. Suitable pharmaceutical compositions may be formulated by means known in the art, and their mode of administration and dose determined by the skilled practitioner. These protocols are routine procedures and any modifications are well within the scope of one skilled in the art and from the teaching herein. In preferred embodiments, pharmaceutical compositions according to this disclosure are sterile compositions. Except insofar as any conventional media or agent is incompatible with the active ingredient(s), its use in the therapeutic composition is contemplated. Supplementary active ingredient(s) can also be incorporated into the composition.

[1578] A therapeutic compound disclosed herein may be formulated by itself in a pharmaceutical composition, or may be formulated together with one or more other therapeutic compounds disclosed herein in a single pharmaceutical composition. Depending upon the particular condition, or disease, to be treated, additional therapeutic agent(s) that are normally administered to treat that condition may also be present in the compositions disclosed herein.

[1579] Some examples of materials which can serve as pharmaceutically acceptable carriers include: (1) sugars, such as lactose, glucose and sucrose; (2) starches, such as corn starch and potato starch; (3) cellulose, and its analogs, such as sodium carboxymethyl cellulose, ethyl cellulose and cellulose acetate; (4) powdered tragacanth; (5) malt, (6) gelatin; (7) talc.; (8) excipients, such as cocoa butter and suppository waxes; (9) oils, such as peanut oil, cotton seed oil, safflower oil, sesame oil, olive oil, corn oil and soybean oil: (10) glycols, such as propylene glycol; (11) polyols, such as glycerin, sorbitol, mannitol and polyethylene glycol; (12) esters, such as ethyl oleate and ethyl laurate; (13) agar, (14) buffering agents, such as magnesium hydroide and aluminum hydroxide; (15) alginic acid, (16) pyrogen-free water, (17) isotonic saline; (18) Ringer's solution; (19) ethyl alcohol; (20) phosphate buffer solutions; and (21) other non-toxic compatible substances employed in pharmaceutical formulations.

[1580] Buffers include, without limitation, acetate buffers, citrate buffers, phosphate buffers, neutral buffered saline, phosphate buffered saline and borate buffers. It is understood that acids or bases can be used to adjust the pH of a composition as needed. Pharmaceutically acceptable antioxidants include, without limitation, sodium metabisulfite, sodium thiosulfate, acetylcysteine, butylated hydroxyanisole and butylated hydroxytoluene, (1) water soluble antioxidants, such as ascorbic acid, cysteine hydrochloride, sodium bisulfate, sodium metabisulfite, sodium sulfite and the like; (2) oil-soluble antioxidants, such as ascorbyl palmitate, butylated hydroxyanisole (BHA), butylated hydroxytoluene (BHT), lecithin, propyl gallate, alpha-tocopherol, and the like; (3) metal chelating agents, such as citric acid, ethylenediamine tetraacetic acid (EDTA), sorbitol, tartaric acid, phosphoric acid, and the like. Useful preservatives include, without limitation, benzalkonium chloride, chlorobutanol, thimerosal, phenylmercuric acetate, phenylmercuric nitrate, a stabilized oxychloro composition and chelants, such as, e.g., DTPA or DTPA-bisamide, calcium DTPA, and CaNaDTPA-bisamide. Tonicity adjustors useful in a pharmaceutical composition include, without limitation, salts such as, e.g., sodium chloride, potassium chloride, mannitol or glycerin and other pharmaceutically acceptable tonicity adjustor.

[1581] In certain embodiments, the pharmaceutical preparation is non-pyrogenic i.e. does not substantially elevate the body temperature of a subject.

[1582] The amount of active ingredient that can be combined with a carrier material to produce a single dosage form will generally be that amount of the compound which produces a therapeutic effect. Generally, out of one hundred percent, this amount will range from about 1 percent to about ninety-nine percent of active ingredient, preferably from about 5 percent to about 70 percent, most preferably from about 10 percent to about 30 percent.

[1583] Methods of preparing these formulations or compositions include the step of bringing into association a compound(s) of the present disclosure with the carrier and, optionally, one or more accessory ingredients. In general, the formulations are prepared by uniformly and intimately bringing into association a compound of the present disclosure with liquid carriers, or finely divided solid carriers, or both, and then, if necessary, shaping the product.

### Cosmetic Composition

[1584] At all places herein that a “pharmaceutical composition” is referred to, in alternative embodiments this is substituted with “cosmetic composition”, wherein some good starting guides in this area: “Harry's Cosmeticology” [e.g. its 9^{th} edition by Meyer R. Rosen (Editor)], Chemical Publishing Company, USA, and Milady's “Standard Textbook of Cosmetology” (Delmar Learning), and “Formulation Technology. Emulsions, Suspensions, Solid Forms” by Hans Mollet, Arnold Grubenmann and Helen Payne, published by John Wiley & Sons, and “Chemistry and Technology of the Cosmetics and Toiletries Industry” by Clifford Williams Schmitt, Kluwer Academic Publishers, and Fiedler's “Encyclopedia of Excipients”, Cantor Verlag Aulendorf. In further embodiments, this is substituted with “supplement composition” or “dietary supplement composition” or “nutraceutical composition” or “cosmaceutical composition” or similar. At all places herein that “pharmaceutically-acceptable” or “pharmaceutically acceptable” is referred to, in alternative embodiments this is substituted with “cosmetically-acceptable”.

### Administration

[1585] A compound(s) of Formula [X] may be administered by any means suitable for the condition to be treated e.g. orally (e.g. taken with fatty food(s) to help absorption), topically, mucosally, locally, by inhalation, by intubation, by injection (e.g. injection(s) into a joint(s) e.g. the knee(s) and/or elbow(s) and/or wrist(s) and/or shoulder(s) and/or ankle(s) and/or hip(s) and/or one or more joints of the hand(s) and/or foot/feet), by infusion, by continuous infusion, by localized perfusion, via a catheter, via a lavage, parenteral administration. e.g. by intramuscular, intradermal, epicutaneous, intraperitoneal, intravenous or intra-arterial/intraarterial (infusion or bolus, dose given continuously or intermittently), intracisternal, epidural, intrasternal, intramedullary, intravesical injection or infusion, direct injection/infusion into a ventricle of the brain, administration via the cerebrospinal fluid (CSF, e.g. by lumbar injection and/or injection into the cisterna magna), intracranial, stereotaxic microinjection, instillation, subcutaneous injection/implant, transdermal (e.g. by skin patch, controlled release patch), transmucosal (e.g., nasal, sublingual, vaginal, buccal, or rectal) or oral routes, all using dosage forms well known to those of ordinary skill in the pharmaceutical arts. For further example: oral, enteric, parenteral, enteral (e.g. oral, buccal, sublabial, lingual, sublingual), infusion, injection, transdermal, intradermal, topical, paste applied to tongue, intravaginal (e.g. pessaries, tampons), intrarectal, rectal (e.g. by suppository, retention enema, enema, Murphy drip), transcutaneous, intracutaneous, subcutaneous, sublabial, subcuticular, intramuscular, intraarticular, intracapsular, subcapsular, subarachnoid, ocular/intraocular/ophthalmic (e.g. by eye drops {optionally using a measured dose eyedropper}, eye lotion, thin film), intraorbital, intraocular, intravitreal, retrobulbar, subconjunctival, aural, ear drops, intrathecal, intraventricular, intracardiac, intrapericardial, intrasynovial, intracerebral, intracranial, intracerebroventricular (optionally using a Ommaya reservoir), intraduodenal, intradermal, transdermal, intrapleural, intraspinal, intrasternal, intrathecal, intralesional, intratumoral, intracavernous (base of penis), intraprostatically, extra-amniotic administration/infusion, intraumbilical, perivascular administration, intravesicular, intraosseously (e.g. intraosseous infusion), endotracheally, transtracheal, intratracheal, intravaginal, nasally, intranasal, by inhalation, insufflation (snorting), by skin patch, by dermal patch, by transdermal patch (e.g., without restriction, matrix type patch, reservoir type patch, monolithic drug-in-adhesive type patch, multilaminate drug-in-adhesive type patch, and the like, refer Ghosh TK, Pfister WR, Yum SI, Transdermal and Topical Drug Delivery Systems, Interpharm Press, Inc., one of ordinary skill in the art can determine other patches which can be employed in the present disclosure), by adhesive bandage, transdermal spray, transdermal implant, nanocell injection, patient controlled pump, peripherally inserted central catheter (PIC line), delivery by catheter, indwelling catheter, gastric/duodenal feeding tube, gastrostomy, enteral nutrition, balloon (drug-eluting balloon), stent (drug-eluting stent), vaginal ring, vaginal sponge, vaginal douche, intrauterine device, cervical ring and the like, local injection into a body part(s) that is affected by a cancer(s), intratumorally. The compound(s) may be delivered by pill/tablet/capsule/pastille/time release technology/modified release dosage/osmotic delivery system/orally disintegrating tablet/film/thin-film/oral thin film (including multi-layer film)/dissolving film/oral drug strip/lollipop/sublingual drops/lozenges/effervescent buccal tablet/chewing gum/smoking device/dry-powder inhaler/vaporizer/nebulizer/metered-dose inhaler/gas mask/nasal cannula/nasal spray/mucoadhesive microdisc/pessary/suppository/electuary/emulsion/extended-release syrup/effervescent [powder/tablet]/hydrogel/molecular encapsulation/powder/softgel/solution/suspension/slurry/liquid/syrup/syrup concentrate for dilution and/or addition of carbonated water/tincture/mouthwash/toothpaste/ointment/oral spray/nasal spray/liniment/electrophoretic dermal delivery system/liposomes/transfersome vesicles/lip balm/shampoo/jet injector/vapor/solid/decoction/ointment/cream/salve/oil/rinse/alcohol/spray/aerosol/foam/paste/lotion/tincture/shake lotion/gel/implant/dressing/sponge/tape/drop/powder/patch/transdermal patch/electroporation/iontophoresis/phonophoresis/sonophoresis, penetration enhancers may be incorporated e.g. see Finnin and Morgan, J. Pharm. Sci. 1999, 88, 955-958). In other embodiments, local administration may be accomplished by implanting a sustained-release device such as a pump or a micropump, or sustained-release implant, such as a bead or gel that contains the compound(s), e.g. anti-cancer agent, and slowly releases the drug into the desired area over time. Suitable devices for parenteral administration include needle (including microneedle) injectors, needle-free injectors and infusion techniques. The compound may be delivered orally, such as in the form of tablets (optionally chewable)/caplets/capsules/pills/lozenges (including liquid filled)/pastilles/electuary/paste/oral films/[buccal/mucoadhesive] patches (each of which also includes sustained release or timed release formulations), granules, pastilles (e.g. using an inert base, such as gelatin and glycerin, or sucrose and acacia), lozenges (e.g. using a flavored basis, usually sucrose and acacia or tragacanth), lyophilisates, dragees, cachets, troches, microgranules, pellets, soft-gels, powders, powders for reconstitution, dispersions, tinctures, or liquid formulations including syrups, liquids, solutions, elixirs, suspensions (e.g., aqueous or non-aqueous liquid suspensions, oil-in-water emulsions, or a water-in-oil liquid emulsions), emulsions, microemulsions, solutions, mouthwashes, elixirs and the like, each containing a predetermined amount of a compound(s) of the present disclosure as an active ingredient; liquid dosage forms suitable for parenteral administration to a patient; eye drops or other ophthalmic preparations suitable for topical administration; emulsions or magmas; sublingually; bucally; transdermally; parenterally, such as by subcutaneous, intravenous (bolus and/or infusion), intramuscular or intrasternal injection or infusion (e.g., as sterile injectable aqueous or non-aqueous solutions or suspensions; sterile solids {e.g., crystalline or amorphous solids} that can be reconstituted to provide liquid dosage forms suitable for parenteral administration); nasally such as by inhalation spray (aerosol, nasal spray, inhaler, nebuliser etc.); rectally such as in the form of suppositories; or liposomally; each containing a predetermined amount of a compound(s) of the present disclosure as an active ingredient. A compound(s) of the present disclosure may also be administered as a bolus, electuary or paste. A compound(s) of this disclosure can be administered alone, but generally will be administered with a pharmaceutical carrier selected on the basis of the chosen route of administration and standard pharmaceutical practice. Dosage unit formulations containing non-toxic, pharmaceutically acceptable vehicles or diluents may be administered. The compounds may be administered in a form suitable for immediate release or extended release. Immediate release or extended release may be achieved with suitable pharmaceutical compositions or, particularly in the case of extended release, with devices such as subcutaneous implants or osmotic pumps.

[1586] To illustrate, for oral administration in the form of a tablet or capsule, the active drug component can be combined with an oral, non-toxic, pharmaceutically acceptable, inert carrier such as lactose, starch, sucrose, glucose, methyl cellulose, magnesium stearate, dicalcium phosphate, calcium sulfate, mannitol, sorbitol and the like; for oral administration in liquid form, the oral drug components can be combined with any oral, non-toxic, pharmaceutically acceptable inert carrier such as ethanol, glycerol, water, and the like. Moreover, when desired or necessary, suitable binders, lubricants, disintegrating agents, and coloring agents can also be incorporated into the mixture. Suitable binders include starch, gelatin, natural sugars such as glucose or beta-lactose, corn sweeteners, natural and synthetic gums such as acacia, tragacanth, or sodium alginate, carboxymethylcellulose, polyethylene glycol, waxes, and the like. Lubricants used in these dosage forms include sodium oleate, sodium stearate, magnesium stearate, sodium benzoate, sodium acetate, sodium chloride, and the like. Disintegrators include, without limitation, starch, methyl cellulose, agar, bentonite, xanthan gum, and the like.

[1587] In solid dosage forms of this disclosure for oral administration (capsules, tablets, pills, dragees, powders, granules and the like), the active ingredient is mixed with one or more pharmaceutically acceptable carriers, such as sodium citrate or dicalcium phosphate, and/or any of the following: (1) fillers or extenders, such as starches, lactose, sucrose, glucose, mannitol, and/or silicic acid; (2) binders, such as, for example, carboxymethylcellulose, alginates, gelatin, polyvinyl pyrrolidone, sucrose and/or acacia; (3) humectants, such as glycerol; (4) disintegrating agents, such as agar-agar, calcium carbonate, potato or tapioca starch, alginic acid, certain silicates, and sodium carbonate; (5) solution retarding agents, such as paraffin; (6) absorption accelerators, such as quaternary ammonium compounds; (7) wetting agents, such as, for example, cetyl alcohol and glycerol monostearate; (8) absorbents, such as kaolin and bentonite clay; (9) lubricants, such as talc, calcium stearate, magnesium stearate, solid polyethylene glycols, sodium lauryl sulfate, and mixtures thereof; and (10) coloring agents. In the case of capsules, tablets and pills, the pharmaceutical compositions may also comprise buffering agents. Solid compositions of a similar type may also be employed as fillers in soft and hard-filled gelatin capsules using such excipients as lactose or milk sugars, as well as high molecular weight polyethylene glycols and the like.

[1588] A tablet may be made by compression or molding, optionally with one or more accessory ingredients. Compressed tablets may be prepared using binder (for example, gelatin or hydroxypropylmethyl cellulose), lubricant, inert diluent, preservative, disintegrant (for example, sodium starch glycolate or cross-linked sodium carboxymethyl cellulose), surface-active or dispersing agent. Molded tablets may be made by molding in a suitable machine a mixture of the powdered compound moistened with an inert liquid diluent.

[1589] The tablets, and other solid dosage forms of the pharmaceutical compositions of the present disclosure, such as dragees, capsules, pills and granules, may optionally be scored or prepared with coatings and shells, such as enteric coatings and other coatings well known in the pharmaceutical-formulating art. They may also be formulated so as to provide slow or controlled release of the active ingredient therein using, for example, hydroxypropylmethyl cellulose in varying proportions to provide the desired release profile, other polymer matrices, liposomes and/or microspheres. They may be sterilized by, for example, filtration through a bacteria-retaining filter, or by incorporating sterilizing agents in the form of sterile solid compositions which can be dissolved in sterile water, or some other sterile injectable medium immediately before use. These compositions may also optionally contain opacifying agents and may be of a composition that they release the active ingredient(s) only, or preferentially, in a certain portion of the gastrointestinal tract, optionally, in a delayed manner. Examples of embedding compositions which can be used include polymeric substances and waxes. The active ingredient can also be in micro-encapsulated form, if appropriate, with one or more of the above-described excipients.

[1590] Gelatin capsules may contain the active ingredient and powdered carriers, such as lactose, starch, cellulose derivatives, magnesium stearate, stearic acid, and the like. Similar diluents can be used to make compressed tablets. Both tablets and capsules can be manufactured as sustained release products to provide for continuous release of medication over a period of hours. Compressed tablets can be sugar coated or film coated to mask any unpleasant taste and protect the tablet from the atmosphere, or enteric coated for selective disintegration in the gastrointestinal tract.

[1591] Exemplary compositions for oral administration include suspensions which may contain, for example, microcrystal line cellulose for imparting bulk, alginic acid or sodium alginate as a suspending agent, methylcellulose as a viscosity enhancer, and sweeteners or flavouring agents such as those known in the art; and immediate release tablets which may contain, for example, microcrystalline cellulose, sugar(s), dicalcium phosphate, starch, magnesium stearate and/or lactose and/or other excipients, binders, extenders, disintegrants, diluents, granulating agents and lubricants such as those known in the art. The compounds may be orally delivered by sublingual and/or buccal administration, e.g., with molded, compressed, or freeze-dried tablets. Exemplary compositions may include fast-dissolving diluents such as mannitol, lactose, sucrose, and/or cyclodextrins. Also included in such formulations may be high molecular weight excipients such as celluloses (AVICEL®) or polyethylene glycols (PEG); an excipient to aid mucosal adhesion such as hydroxypropyl cellulose (HPC), hydroxypropyl methyl cellulose (HPMC), sodium carboxymethyl cellulose (SCMC), and/or maleic anhydride copolymer (e.g., GANTREZ®); and agents to control release such as polyacrylic copolymer (e.g., CARBOPOL 934®). Lubricants, glidants, flavours, fragrances, colorants, colouring agents and stabilizers may also be added for ease of fabrication and use.

[1592] The pharmaceutical compositions disclosed herein for (e.g. oral) administration may be also administered in the forms of liposomes, liposome suspensions, niosomes, micelles, micellar solutions, microspheres, or nanosystems. Micellar dosage forms can be prepared as described in U.S. Pat. No. 6,350,458.

[1593] Liquid dosage forms for oral administration of the compounds of this disclosure include pharmaceutically acceptable emulsions, microemulsions, solutions, suspensions, syrups and elixirs. In addition to the active ingredient, the liquid dosage forms may contain inert diluents commonly used in the art, such as, for example, water or other solvents, solubilizing agents and emulsifiers, such as ethyl alcohol, isopropyl alcohol, ethyl carbonate, ethyl acetate, benzyl alcohol, benzyl benzoate, propylene glycol, 1,3-butylene glycol, oils (in particular, cottonseed, groundnut, corn, germ, olive, castor and sesame oils), glycerol, tetrahydrofuryl alcohol, polyethylene glycols and fatty acid esters of sorbitan, and mixtures thereof.

[1594] Liquids for oral administration may be in the form of suspensions, solutions, emulsions, or syrups, or may be lyophilized or presented as a dry product for reconstitution with water or other suitable vehicle before use. Such liquid compositions may optionally contain: pharmaceutically-acceptable excipients such as preservatives, buffers, propellants, suspending agents (for example, sorbitol, methyl cellulose, sodium alginate, gelatin, hydroxyethylcellulose, carboxymethylcellulose, aluminum stearate gel and the like); non-aqueous vehicles, e.g., oil (for example, almond oil or fractionated coconut oil), propylene glycol, ethyl alcohol, or water; preservatives (for example, methyl or propyl p-hydroxybenzoate or sorbic acid); wetting agents such as lecithin; and, if desired, flavoring or coloring agents. Indeed, liquid dosage forms for oral administration can contain coloring and flavoring to increase patient acceptance.

[1595] Suspensions, in addition to the active compounds, may contain suspending agents as, for example, ethoxylated isostearyl alcohols, polyoxyethylene sorbitol and sorbitan esters, microcrystalline cellulose, aluminum metahydroxide, bentonite, agar-agar, and tragacanth, and mixtures thereof.

[1596] Oily Suspensions may be formulated by suspending a therapeutic compound disclosed herein in admixture with (a) Vegetable oils, such as, e.g., almond oil, arachis oil, avocado oil, canola oil, castor oil, coconut oil, corn oil, cottonseed oil, grape seed oil, hazelnut oil, hemp oil, linseed oil, olive oil, palm oil, peanut oil, rapeseed oil, rice bran oil, safflower oil, sesame oil, soybean oil, soya oil, sunflower oil, walnut oil, wheat germ oil, or a combination thereof, (b) a saturated fatty acid, an unsaturated fatty acid, or a combination thereof. Such as, e.g., palmitic acid, stearic acid, oleic acid, linoleic acid, linolenic acid, or a combination thereof, (c) mineral oil such as, e.g., liquid paraffin, (d) Surfactants or detergents. The oily suspensions may contain a thickening agent, for example beeswax, hard paraffin or cetyl alcohol. Sweetening agents and flavoring agents may be added to provide a palatable oral preparation. These compositions may be preserved by the addition of an antioxidant such as ascorbic acid.

[1597] A therapeutic compound disclosed herein may be in the form of oil-in-water emulsions. The oily phase may be a vegetable oil as disclosed herein or a mineral oil as disclosed herein or mixtures thereof. Suitable emulsifying agents may be naturally occurring gums, such as, e.g., gum acacia or gum tragacanth, naturally occurring phosphatides, for example soya bean, lecithin, and esters or partial esters derived from fatty acids and hexitol anhydrides, for example sorbitan monooleate and condensation products of the said partial esters with ethylene oxide, for example polyoxyethylene sorbitan monooleate.

[1598] Exemplary compositions for nasal aerosol or inhalation administration include solutions which may contain, for example, benzyl alcohol or other suitable preservatives, absorption promoters to enhance absorption and/or bioavailability, and/or other solubilizing or dispersing agents such as those known in the art.

[1599] Pharmaceutical compositions of this disclosure suitable for parenteral administration comprise one or more compounds of this disclosure in combination with one or more pharmaceutically acceptable sterile isotonic aqueous or nonaqueous solutions, dispersions, suspensions or emulsions, or sterile powders which may be reconstituted into sterile injectable solutions or dispersions just prior to use, which may contain antioxidants, buffers, bacteriostats, solutes which render the formulation isotonic with the blood of the intended recipient, or suspending or thickening agents.

[1600] Examples of suitable aqueous and nonaqueous carriers which may be employed in the pharmaceutical compositions of this disclosure include water, ethanol, polyols (such as glycerol, propylene glycol, polyethylene glycol, and the like), and suitable mixtures thereof, vegetable oils, such as olive oil, and injectable organic esters, such as ethyl oleate. Proper fluidity can be maintained, for example, by the use of coating materials, such as lecithin, by the maintenance of the required particle size in the case of dispersions, and by the use of surfactants.

[1601] These compositions may also contain adjuvants such as preservatives, wetting agents, emulsifying agents and dispersing agents. Inhibition of the action of microorganisms may be ensured by the inclusion of various antibacterial and antifungal agents, for example, paraben, chlorobutanol, phenol sorbic acid, and the like. It may also be desirable to include isotonic agents, such as sugars, sodium chloride, and the like into the compositions. In addition, prolonged absorption of the injectable pharmaceutical form may be brought about by the inclusion of agents which delay absorption, such as aluminum monostearate and gelatin.

[1602] In some cases, in order to prolong the effect of a drug, it is desirable to slow the absorption of the drug from subcutaneous or intramuscular injection. This may be accomplished by the use of a liquid suspension of crystalline or amorphous material having poor water solubility. The rate of absorption of the drug then depends upon its rate of dissolution which, in turn, may depend upon crystal size and crystalline form. Alternatively, delayed absorption of a parenterally administered drug form is accomplished by dissolving or suspending the drug in an oil vehicle.

[1603] Injectable depot forms are made by forming microencapsule matrices of the subject compounds in biodegradable polymers such as polylactide-polyglycolide. Depending on the ratio of drug to polymer, and the nature of the particular polymer employed, the rate of drug release can be controlled. Examples of other biodegradable polymers include poly(orthoesters) and poly(anhydrides). Depot injectable formulations are also prepared by entrapping the drug in liposomes or microemulsions which are compatible with body tissue.

[1604] Exemplary compositions for parenteral administration include injectable solutions or suspensions, preferably sterile and preferably buffered to an appropriate pH and isotonicity, and/or which may contain, for example, suitable non-toxic, parenterally acceptable diluents, oils or solvents, such as mannitol, 1,3-butanediol, water, Ringer's solution, an isotonic sodium chloride solution, or other suitable dispersing or wetting and suspending agents, including synthetic mono- or diglycerides, and fatty acids, including oleic acid, ethyl alcohol, polyethylene glycol, polypropylene glycol, corn oil, cottonseed oil, peanut oil, sesame oil, ethyl oleate, isopropyl myristate, and benzyl benzoate. In general, water, a suitable oil, saline, aqueous dextrose (glucose), and related sugar solutions and glycols such as propylene glycol or polyethylene glycols are suitable carriers for parenteral solutions. Solutions for parenteral administration preferably contain a water soluble salt of the active ingredient, suitable stabilizing agents, and if necessary, buffer substances. Antioxidizing agents such as sodium bisulfite, sodium sulfite, or ascorbic acid, either alone or combined, are suitable stabilizing agents. Also used are citric acid and its salts and sodium EDTA. In addition, parenteral solutions can contain preservatives, such as benzalkonium chloride, methyl- or propyl-paraben, and chlorobutanol. Such forms may be presented in unit-dose form such as ampoules or disposable injection devices, in multi-dose forms such as vials from which the appropriate dose may be withdrawn, or in a solid form or pre-concentrate that can be used to prepare an injectable formulation. Compounds that increase the solubility of one or more of the active ingredients disclosed herein can also be incorporated into the parenteral dosage forms provided herein. For example, cyclodextrin and/or its derivatives can be used to increase the solubility of a compound provided herein.

[1605] Sterile compositions of compound(s) of this disclosure are contemplated by this disclosure, indeed preferred, including compositions that are in accord with national and local regulations governing such compositions.

[1606] Formulations of the pharmaceutical compositions of this disclosure for rectal or vaginal administration may be presented as a suppository, which may be prepared by mixing one or more compounds of this disclosure with one or more suitable nonirritating excipients or carriers comprising, for example, cocoa butter, polyethylene glycol, a suppository wax or a salicylate, and which is solid at room temperature, but liquid at body temperature and, therefore, will melt in the rectum or vaginal cavity and release the active ingredient. Exemplary compositions for rectal/vaginal administration include suppositories which may contain, for example, suitable non-irritating excipients, such as cocoa butter, synthetic glyceride esters or polyethylene glycols, which are solid at ordinary temperatures but liquefy and/or dissolve in the rectal/vaginal cavity to release the drug. Formulations of the present disclosure which are suitable for vaginal administration also include pessaries, tampons, creams, gels, pastes, foams or spray formulations containing such carriers as are known in the art to be appropriate.

[1607] Dosage forms for the topical or transdermal administration of a compound of this disclosure include powders, sprays, ointments, pastes, creams, lotions, gels, solutions, patches and inhalants. The active compound may be mixed under sterile conditions with a pharmaceutically acceptable carrier, and with any preservatives, buffers, or propellants which may be required.

[1608] The ointments, pastes, creams and gels may contain, in addition to an active compound of this disclosure, excipients, such as animal and vegetable fats, oils, waxes, paraffins, starch, tragacanth, cellulose analogs, polyethylene glycols, silicones, bentonites, silicic acid, talc and zinc oxide, or mixtures thereof.

[1609] Powders and sprays can contain, in addition to a compound of this disclosure, excipients such as lactose, talc, silicic acid, aluminum hydroxide, calcium silicates and polyamide powder, or mixtures of these substances. Sprays can additionally contain customary propellants, such as chlorofluorohydrocarbons and volatile unsubstituted hydrocarbons, such as butane and propane.

[1610] Ophthalmic formulations, eye ointments, powders, solutions, drops and the like, are also contemplated as being within the scope of this disclosure.

[1611] Transdermal patches have the added advantage of providing controlled delivery of a compound of the present disclosure to the body. Such dosage forms can be made by dissolving or dispersing the composition in the proper medium. Absorption enhancers can also be used to increase the flux of the composition across the skin. The rate of such flux can be controlled by either providing a rate-controlling membrane or dispersing the compound in a polymer matrix or gel.

[1612] In some embodiments, a compound or pharmaceutical formulation in accordance may be administered by means of a medical device or appliance such as an implant, graft, prosthesis, stent etc. Implants may be devised which are intended to contain and release such compounds or compositions. An example would be an implant made of a polymeric material adapted to release the compound over a period of time.

[1613] A compound(s) of the present disclosure can also be administered in the form of liposome delivery systems, such as small unilamellar vesicles, large unilamellar vesicles, and multilamellar vesicles. Liposomes can be formed from a variety of phospholipids, such as cholesterol, stearylamine, or phosphatidylcholines. Any non-toxic, physiologically acceptable and metabolizable lipid capable of forming liposomes can be used. A compound(s) described herein, when in liposome form can contain, in addition to a compound(s) described herein, stabilizers, preservatives, excipients, and the like. Methods to form liposomes are known in the art. (See, e.g., Prescott, Ed., Methods in Cell Biology, Volume XIV, Academic Press, New York, N.Y., (1976), p 33 et seq.). See e.g. Liposomes as drug carriers: Recent trends and progress. Edited by Gregory Gregoriadis. John Wiley: Chichester, UK. An active agent(s) disclosed herein can also be formulated as liposomes. Liposomes are prepared by methods known in the art, such as described in Epstein et al., Proc. Natl. Acad. Sci. USA, 82:3688 (1985): Hwang et al., Proc. Natl Acad. Sci. USA, 77:4030 (1980); and U.S. Pat. Nos. 4,485,045 and 4,544.545. Liposomes with enhanced circulation time are disclosed in U.S. Pat. No. 5,013,556.

[1614] Compounds of the present disclosure may also be coupled with soluble polymers as targetable drug carriers. Such polymers can include polyvinylpyrrolidone, pyran copolymer, polyhydroxypropylmethacrylamide-phenol, polyhydroxyethylaspartamidephenol, or polyethyleneoxide-polylysine substituted with palmitoyl residues. Furthermore, the compounds of the present disclosure may be coupled to a class of biodegradable polymers useful in achieving controlled release of a drug, for example, polylactic acid, polyglycolic acid, copolymers of polylactic and polyglycolic acid, polyepsilon caprolactone, polyhydroxy butyric acid, polyorthoesters, polyacetals, polydihydropyrans, polycyanoacylates, and crosslinked or amphipathic block copolymers of hydrogels.

[1615] Consumable oral films for human or veterinary use are typically pliable water-soluble or water-swellable thin film dosage forms which may be rapidly dissolving or mucoadhesive and typically comprise a compound(s) of Formula [X], a film-forming polymer, a binder, a solvent, a humectant, a plasticizer, a stabilizer or emulsifier, a viscosity-modifying agent, a solvent and, more optionally, a saliva stimulating agent and one or more agents relating to taste. Alternatively, the compound(s) of Formula [X] may be in the form of multiparticulate beads.

[1616] The compounds of this disclosure (including pharmaceutically acceptable salts thereof) can be administered intranasally or by inhalation, in the form of a dry powder, from a dry powder inhaler, as an aerosol spray from a pressurized container, pump, spray, atomizer (for example an atomizer using electrohydrodynamics to produce a fine mist), or nebulizer, or as nasal drops. In inhaled dosage forms, the therapeutic compound(s) may be prepared for delivery as an aerosol in a liquid propellant for use in a pressurised (PDI) or other metered dose inhaler (MDI). A therapeutic compound may also be delivered using a nebuliser or other aerosol delivery system. The pharmaceutical composition may be in the form of an aerosol or solution for delivery using a pressurized container, pump, spray, atomizer, such as an atomizer using electrohydrodynamics to produce a fine mist, or nebulizer, alone or in combination with a suitable propellant, such as 1,1,1,2-tetrafluoroethane or 1.1.1.2.3,3,3-heptafluoropropane.

### Targeted Delivery

[1617] A pharmaceutical composition disclosed herein may also be formulated to be targeted to a particular tissue, receptor, or other area of the body of the subject to be treated, including liposome-, resealed erythrocyte-, and antibody based delivery systems. Examples include, but are not limited to, U.S. Pat. Nos. 6,316,652; 6,274,552; 6,271,359; 6,253,872:6,139,865; 6,131.570; 6,120,751; 6,071,495; 6,060,082:6,048,736; 6,039,975; 6,004,534; 5,985,307; 5,972,366; 5,900,252; 5,840,674; 5,759,542; and 5,709,874.

### Topical Administration

[1618] Certain compounds disclosed herein may be administered topically, that is by non-systemic administration. This includes the application of a compound(s)/composition(s) disclosed herein externally to the epidermis or the buccal cavity and the instillation of such a compound into the ear, eye and nose, such that the compound does not significantly enter the blood stream.

[1619] A pharmaceutical composition(s) disclosed herein may be administered topically to the skin, orifice(s), or mucosa. The topical administration, as used herein, include (intra) dermal, conjuctival, intracorneal, intraocular, ophthalmic, auricular, transdermal, nasal, vaginal, uretheral, respiratory, and rectal administration.

[1620] The pharmaceutical compositions disclosed herein may be formulated in any dosage forms that are suitable for topical administration for local or systemic effect, including emulsions, solutions, suspensions, creams, gels, hydrogels, ointments, dusting powders, dressings, elixirs, lotions, suspensions, tinctures, pastes, foams, films, aerosols, irrigations, sprays, suppositories, bandages, dermal patches. The topical formulation of the pharmaceutical compositions disclosed herein may also comprise liposomes, niosomes, micelles, microspheres, nanosystems, and mixtures thereof.

[1621] Pharmaceutically acceptable carriers and excipients suitable for use in the topical formulations disclosed herein include, but are not limited to, aqueous vehicles, water-miscible vehicles, non-aqueous vehicles, antimicrobial agents or preservatives against the growth of microorganisms, stabilizers, solubility enhancers, isotonic agents, buffering agents, antioxidants, local anesthetics, suspending and dispersing agents, wetting or emulsifying agents, complexing agents, sequestering or chelating agents, penetration enhancers, cryopretectants, lyoprotectants, thickening agents, and inert gases.

[1622] The pharmaceutical compositions may also be administered topically by electroporation, iontophoresis, phonophoresis, sonophoresis and microneedle or needle-free injection, such as POWDERJECT™ (Chiron Corp., Emeryville, Calif.), and BIOJECT™ (Bioject Medical Technologies Inc., Tualatin, Oreg.).

[1623] The pharmaceutical compositions disclosed herein may be disclosed in the forms of ointments, creams, and gels. Suitable ointment vehicles include oleaginous or hydrocarbon vehicles, including such as lard, benzoinated lard, olive oil, cottonseed oil, and other oils, white petrolatum; emulsifiable or absorption vehicles, such as hydrophilic petrolatum, hydroxy stearin sulfate, and anhydrous lanolin; water-removable vehicles, such as hydrophilic ointment; water-soluble ointment vehicles, including polyethylene glycols of varying molecular weight; emulsion vehicles, either water-in-oil (W/O) emulsions or oil-in-water (O/W) emulsions, including cetyl alcohol, glyceryl monostearate, lanolin, and stearic acid (see, Remington. The Science and Practice of Pharmacy, Supra). These vehicles are emollient but generally require addition of antioxidants and preservatives. Suitable cream base can be oil-in-water or water-in oil. Cream vehicles may be water-washable, and contain an oil phase, an emulsifier, and an aqueous phase. The oil phase is also called the “internal’ phase, which is generally comprised of petrolatum and a fatty alcohol such as cetyl or stearyl alcohol. The aqueous phase usually, although not necessarily, exceeds the oil phase in volume, and generally contains a humectant. The emulsifier in a cream formulation may be a nonionic, anionic, cationic, or amphoteric surfactant.

[1624] Gels are semisolid, suspension-type systems. Single-phase gels contain organic macromolecules distributed substantially uniformly throughout the liquid carrier. Suitable gelling agents include crosslinked acrylic acid polymers, such as carbomers, carboxypolyalkylenes, Carbopol R; hydrophilic polymers, such as polyethylene oxides, polyoxyethylene-polyoxypropylene copolymers, and polyvinylalcohol; cellulosic polymers, such as hydroxypropyl cellulose, hydroxyethyl cellulose, hydroxypropyl methylcellulose, hydroxypropyl methylcellulose phthalate, and methylcellulose; gums, such as tragacanth and xanthan gum, sodium alginate; and gelatin. In order to prepare a uniform gel, dispersing agents such as alcohol or glycerin can be added, or the gelling agent can be dispersed by trituration, mechanical mixing, and/or stirring.

[1625] The pharmaceutical compositions disclosed herein may be administered rectally, urethrally, vaginally, or perivaginally in the forms of suppositories, pessaries, bougies, poultices or cataplasm, pastes, powders, dressings, creams, plasters, contraceptives, ointments, solutions, emulsions, suspensions, tampons, gels, foams, sprays, or enemas. These dosage forms can be manufactured using conventional processes as described in Remington. The Science and Prac tice of Pharmacy, Supra. Rectal, urethral, and vaginal suppositories are solid bodies for insertion into body orifices, which are solid at ordinary temperatures but melt or soften at body temperature to release the active ingredient(s) inside the orifices. Pharmaceutically acceptable carriers utilized in rectal and vaginal suppositories include bases or vehicles, such as stiffening agents, which produce a melting point in the proximity of body temperature, when formulated with the pharmaceutical compositions disclosed herein; and antioxidants as described herein, including bisulfite and sodium metabisulfite. Suitable vehicles include, but are not limited to, cocoa butter (theobroma oil), glycerin-gelatin, carbowax (polyoxyethylene glycol), spermaceti, paraffin, white and yellow wax, and appropriate mixtures of mono-, di- and triglycerides of fatty acids, hydrogels, such as polyvinyl alcohol, hydroxyethyl methacrylate, polyacrylic acid; glycerinated gelatin. Combinations of the various vehicles may be used. Rectal and vaginal suppositories may be prepared by the compressed method or molding. The typical weight of a rectal and vaginal suppository is about 2 to about 3 g.

[1626] The pharmaceutical compositions disclosed herein may be administered ophthalmically in the forms of solutions, suspensions, ointments, emulsions, gel-forming solutions, powders for solutions, gels, ocular inserts, and implants.

[1627] The pharmaceutical compositions disclosed herein for topical administration may be formulated to be immediate-release or modified-release, including delayed-, sustained-, pulsed-, controlled-, targeted-, and programmed-release.

### Controlled Release

[1628] In certain embodiments, at least one active ingredient provided herein is administered by controlled release means or by a delivery device. Most controlled-release formulations are designed to initially release an amount of drug (active ingredient) that promptly produces the desired therapeutic effect, and gradually and continually release of other amounts of drug to maintain this level of therapeutic or prophylactic effect over an extended period of time. In order to maintain this constant level of drug in the body, the drug must be released from the dosage form at a rate that will replace the amount of drug being metabolized and excreted from the body. Controlled-release of an active ingredient can be stimulated by various conditions including, but not limited to, pH, temperature, enzymes, water, or other physiological conditions or compounds.

[1629] Examples of modified release include, but are not limited to, those described in U.S. Pat. Nos. 3,845,770; 3,916,899; 3,536,809; 3,598,123; 4,008,719; 5,674,533; 5,059,595; 5,591,767; 5,120,548; 5,073,543; 5,639,476; 5,354,556; 5,639,480; 5,733,566; 5,739,108; 5,891,474; 5,922,356; 5,972,891; 5,980,945; 5,993,855; 6,045,830; 6,087,324; 6,113,943; 6,197,350; 6,248,363; 6,264,970; 6,267,981; 6,376,461; 6,419,961; 6,589,548; 6,613,358; 6,699,500; 3,845,770; 3,916,899; 3,536,809; 3,598,123; 4,008,719, 5,674,533, 5,059,595, 5,591,767, 5,120,548, 5,073,543, 5,639,476, 5,354,556, and 5,733,566, each of which is incorporated herein by reference in its entirety.

[1630] In certain embodiments, such dosage forms are be used to provide slow or controlled-release of one or more active ingredients using, for example, hydropropylmethyl cellulose, other polymer matrices, gels, permeable membranes, osmotic systems, multilayer coatings, microparticles, liposomes, microspheres, or a combination thereof to provide the desired release profile in varying proportions. Encompassed herein are single unit dosage forms suitable for oral administration, including, but not limited to, tablets, capsules, gelcaps, and caplets that are adapted for controlled-release.

[1631] These compositions may also optionally contain opacifying agents and may be of a composition that they release the active ingredient(s) only, or preferentially, in a certain portion of the gastrointestinal tract, optionally, in a delayed manner

[1632] Modified release formulations include delayed-, extended-, prolonged-, sustained-, pulsed-, pulsatile-, controlled-, accelerated-, fast-, targeted- and programmed-release. And gastric retention dosage forms. Some suitable modified release formulations for the purposes of this disclosure are described in U.S. Pat. No. 6,106,864.

[1633] In some cases, in order to prolong the effect of a drug, it is desirable to slow the absorption of the drug. This may be accomplished by the use of a liquid suspension of crystalline or amorphous material having poor water solubility. The rate of absorption of the drug then depends upon its rate of dissolution which, in turn, may depend upon crystal size and crystalline form. Alternatively, delayed absorption of an administered drug form is accomplished by dissolving or suspending the drug in an oil vehicle or by forming and using microencapsuled matrices of the subject compounds in biodegradable polymers such as polylactide-polyglycolide. Depending on the ratio of drug to polymer, and the nature of the particular polymer employed, the rate of drug release can be controlled. Examples of other biodegradable polymers include poly(orthoesters) and poly(anhydrides).

[1634] A therapeutic compound(s) disclosed herein, or a composition comprising such a therapeutic compound(s), may be incorporated into a drug delivery platform in order to achieve a controlled release profile over time. Such a drug delivery platform comprises a therapeutic compound(s) disclosed herein dispersed within a polymer matrix, typically a biodegradable, bioerodible, and/or bioresorbable polymer matrix. Examples of biodegradable, bioerodible, and/or bioresorbable polymers and methods useful to make a drug delivery platform are described in, e.g., Drost, et. al., Controlled Release Formulation, U.S. Pat. No. 4,756,911; Smith, et. al., Sustained Release Drug Delivery Devices, U.S. Pat. No. 5,378,475; Wong and Kochinke. Formulation for Controlled Release of Drugs by Combining Hyrophilic and Hydrophobic Agents, U.S. Pat. No. 7,048,946; Hughes, et. al., Compositions and Methods for Localized Therapy of the Eye, U.S. Patent Publication 2005/0181017: Hughes, Hypotensive Lipid-Containing Biodegradable Intraocular Implants and Related Methods, U.S. Patent Publication 2005/0244464; Altman, et al., Silk Fibroin Hydrogels and Uses Thereof, U.S. Patent Publication 2011/0008437; each of which is incorporated by reference in its entirety.

[1635] In aspects of this embodiment, a polymer composing the matrix is a polypeptide such as, e.g., silk fibroin, keratin, or collagen. In other aspects of this embodiment, a polymer composing the matrix is a polysaccharide such as, e.g., cellulose, agarose, elastin, chitosan, chitin, or a glycosaminoglycan like chondroitin sulfate, dermatan sulfate, keratan sulfate, or hyaluronic acid. In yet other aspects of this embodiment, a polymer composing the matrix is a polyester such as, e.g., D-lactic acid, L-lactic acid, racemic lactic acid, glycolic acid, caprolactone, and combinations thereof.

### Matrix Controlled Release Devices, Osmotic Controlled Release Devices, Multiparticulate Controlled Release Devices

[1636] A compound(s)/composition(s) of this disclosure can be administered to a subject by one or more of these devices, which are described, for example, in US2009/0202540A1, herein incorporated in its entirety, or a different patent application(s) previously/presently assigned to Auspex Pharmaceuticals Inc.

### Implants

[1637] Implantable devices containing a compound(s) of Formula [X] are also included in this disclosure, optionally a bioerodable implant comprising an the active agent dispersed within a biodegradable polymer matrix, optionally wherein 75% of the particles of the active agent have a diameter of less than about 10 um. This disclosure provides implantable (optionally rechargeable or biodegradable) devices that contain a compound(s) of Formula [X], or a pharmaceutically acceptable salt, solvate, hydrate or prodrug thereof. A variety of biocompatible polymers (including hydrogels), including both biodegradable and non-degradable polymers, can be used to form an implant for the sustained release of a drug at a particular target site. The biodegradable polymer can be, for example, a poly (lactic-co-glycolic) acid (PLGA) copolymer.

[1638] Description of some example implantable devices can be found, for example, in U.S. Publication Nos. 2004/0009222, 2004/0180075, 2005/0048099, 2005/0064010 and 2005/0025810, the contents of which are incorporated herein by reference.

### Micronization

[1639] Micronization is the process of reducing the average diameter of a material's particles. It usually refers to the reduction of average particle diameters to the micrometer range, but can also describe further reduction to the nanometer scale (nanonization). A disclosure embodiment is a micronized/nanonized form of a compound(s) and/or composition(s) and/or formulation(s) of Formula [X]. A pharmaceutical composition comprising a micronized/nanonized compound(s) of Formula [X] or a pharmaceutically acceptable salt, solvate, hydrate or prodrug thereof, wherein the compound/composition particles have an average diameter of less than 30 (or 10 or 5) microns (or 400 nm). Smaller particles have increased surface area to volume ratio, which can deliver greater water solubility in the gastrointestinal tract and thence increased bioavailability, especially useful for compounds with poor water solubility, wherein many compounds of Formula [X] have poor water solubility. In certain embodiments, a large proportion of the particles have diameters within a defined range. Drugs according to this disclosure can be micronized using conventional micronization equipment, such as the Micron-Master line of micronizers available from The Jet Pulverizer Company (Moorestown, N.J.), or processed by a third-party micronization processor such as Micron Technologies (Exton, Pa.). U.S. Pat. Nos. 6,645,466, 6,623,760, 6,555,135, hereby incorporated by reference.

### Nanoparticles

[1640] An aspect of the present disclosure provides a composition that includes nanoparticles comprising a compound(s) of Formula [X], or a pharmaceutically acceptable salt, solvate, hydrate or prodrug thereof. Such particles can, for example, have a mean diameter of 5 nm to 900 nm, or 50 nm to 500 nm, such as 100 nm to 200 nm. The term “nanoparticles” can refer to particles formed by a polymeric matrix in which the active compound is dispersed, also known as “nanospheres, and also refers to nanoparticles which are composed of a core containing the active compound which is surrounded by a polymeric membrane, also known as “nanocapsules. A description on preparing nanoparticles can be found, for example, in U.S. Pat. No. 6,264,922, incorporated herein by reference.

### Liposomes

[1641] Liposomes are a further drug delivery system. Accordingly, in the method of disclosure the active compound(s) can also be administered in the form of a liposome delivery system. Liposomes can be formed from a variety of phospholipids, such as cholesterol, stearylamine of phosphatidylcholines, and optionally incorporate one or more “shielding” moities. Liposomes being usable for the method of disclosure encompass all types of liposomes including, but not limited to, small unilamellar vesicles, large unilamellar vesicles and multilamellar vesicles.

[1642] Liposomes are used for a variety of therapeutic purposes, and in particular, for carrying therapeutic agents to target cells. Advantageously, liposome-drug formulations offer the potential of improved drug-delivery properties, which include, for example, controlled drug release. An extended circulation time is often needed for liposomes to reach a target region, cell or site. In particular, this is necessary where the target region, cell or site is not located near the site of administration. For example, when liposomes are administered systemically, it is desirable to coat the liposomes with a hydrophilic agent, for example, a coating of hydrophilic polymer chains such as polyethyleneglycol (PEG) to extend the blood circulation lifetime of the liposomes. Such surface-modified liposomes are commonly referred to as “long circulating or “sterically stabilized” liposomes.

[1643] One surface modification to a liposome is the attachment of PEG chains, typically having a molecular weight from about 1000 daltons (Da) to about 5000 Da, and to about 5 mole percent (%) of the lipids making up the liposomes (see, for example, Stealth Liposomes, CRC Press, Lasic. D. and Martin, F., eds., Boca Raton, Fla., (1995)), and the cited references therein. The pharmacokinetics exhibited by such liposomes are characterized by significantly prolonged blood circulation time, as compared to non surface-modified liposomes, which tend to be rapidly removed from the blood and accumulated in the liver and spleen.

[1644] The PEG moiety can have a molecular weight of for example, 750-20,000 Daltons, such as 1000-10,000 Daltons, in particular 2000-5000 Daltons. In one embodiment, the complex may comprise more than one type of PEG moiety (for example, PEG molecular weight 5K and PEG molecular weight 2K). The PEG moiety may further comprise a suitable functional group, such as, for example, methoxy, N-hydroxyl succinimide (NHS), carbodimide, etc., for ease of conjugating PEG to the lipid or to the targeting factor. Table 2 of Harasym et al. Advanced Drug Delivery Reviews 32:99-118(1998) provides examples of suitable functional groups. Functionalized PEG moieties can be purchased from, for example, Shearwater Polymer Inc. (Huntsville, Ala.) and Avanti Polar Lipid Inc. (Alabaster, Ala.). In an exemplary embodiment, the PEG moiety is N-[methoxy (polyethylene glycol)-5K] (PEG5k). Other types of hydrophilic polymers may be substituted for the PEG moiety, including, for example, poloxamer and poloxamine, as described in Feldman et al. (1997) Gene Therapy 4(3): 189-198: Lemieux et al. (2000) Gene Therapy 7(11): 986-91; Moghimi et al. (2000) Trends. In Biotechnology 18:412-420; Torchilin (1998) Journal of Microencapsulation 15(1): 1-19; and Claesson et al. (1996) Colloids & Surfaces A-Physicochemical & Engineering Aspects 112(2):-3, 131-139.

[1645] The PEG moiety may be conjugated to a suitable lipid to form a “pegylated lipid”. Preferably, the PEG moiety is covalently attached to the lipid. The PEG moiety can be conjugated to the lipid by methods known in the art. See, for example, Woodle (1998) Adv. Drug Delivery Reviews 32:139-152 and references cited therein; Haselgruber et al. (1995) Bioconjug Chem 6:242-248: Shahinian et al. (1995) Biochim Biophys Acta 1239:157-167; Zalipsky et al. (1994) FEBS Lett. 353:71-74; Zalipsky et al. (1997) Bioconjug Chem. 8(2): 111-118: Zalipsky et al. (1995) Bioconjug Chem. 6:705-708; Hansen et al. (1995) Biochim Biophys Acta. 1239(2): 133-44; Allen et al. (1995) Biochim Biophys Acta 1237(2): 99-108; Zalipsky (1995) Bioconjug Chem 6(2): 150-65; Zalipsky (1993) Bioconjug Chem 4(4): 296-9; and Zalipsky (1995) in Stealth Liposomes. (Eds: Lasic, D., et al.) CRC Press, Boca Raton, Fla., p. 93-102. Pegylated lipids are also available commercially from, for example, Shearwater Polymer Inc. (Huntsville, Ala.).

### Cyclodextrin

[1646] A composition comprising a cyclodextrin(s) and a compound(s) of Formula [X], or a pharmaceutically acceptable salt, solvate, hydrate or prodrug thereof, optionally wherein the composition is a liquid that comprises at least 30 mM of a compound of Formula [X], optionally wherein the cyclodextrin is a substituted cyclodextrin, optionally wherein the cyclodextrin is substituted on the 2-, 3- or 6-hydroxyl group of a glycopyranose moiety, optionally wherein the cyclodextrin is amorphous, optionally wherein the cyclodextrin is one or more of 2-hydroxypropyl-β-cyclodextrin (or derivative thereof)/hydroxypropyl-β-cyclodextrin (or derivative thereof)/β-cyclodextrin (or derivative thereof)/α-cyclodextrin (or derivative thereof)/γ-cyclodextrin (or derivative thereof), optionally wherein the composition is a lyophilized (e.g. water soluble), optionally wherein the cyclodextrin(s) is of the structure:

[chemical structure]

[1647] or a pharmaceutically acceptable salt, ester, solvate, or hydrate thereof. Wherein, each R is independently H, D, halogen, alkyl, alkenyl, alkynyl, cycloalkyl, heterocycloalkyl, aryl, or heteroaryl, each of which is optionally substituted; or C(O)OR^{B}, —OC(O)R^{B}, —C(O)R^{B}, or C (O)NR^{A}R^{B};
[1648] each R¹ is selected independently from H, D, alkyl, alkenyl, alkynyl, cycloalkyl, aryl, heteroaryl, halogen, hydroxy, amino, CN, CF₃, N₃, NO₂, OR^{B}, SR^{B}, SOR^{B}, SO₂R^{B}, —N(R^{B})S(O₂), R^{B}, —N(R^{B})S(O²)NR^{A}R^{B}, NR^{A}R^{B}, —C(O)OR^{B}, OC(O)R^{B}, C(O)R^{B}, C (O)NR^{A}R^{B}, or N(R^{B})C(O)R^{B}; each of which is optionally substituted;
[1649] wherein each R^{A} is independently hydrogen, deuterium, alkyl, alkenyl, alkynyl, cycloalkyl, heterocycloalkyl, aryl, or heteroaryl, each of which is optionally substituted;
[1650] wherein each R^{B} is independently hydrogen, deuterium, alkyl, alkenyl, alkynyl, cycloalkyl, heterocycloalkyl, aryl, or heteroaryl, each of which is optionally substituted;
[1651] wherein nis 1, 2, 3, 4, 5, 6, 7, 8, 9, or 10;
[1652] wherein each m is independently 0, 1, 2, 3, 4, or 5.

[1653] A way to produce a formulation, particularly a solution, of a compound(s) of Formula [X] or a derivative thereof, is through the use of cyclodextrin. By cyclodextrin, it is meant α-, β or γ-cyclodextrin. Cyclodextrins are described in detail in Pitha et al., U.S. Pat. No. 4,727,064, which is incorporated herein by reference. Cyclodextrins are cyclic oligomers of glucose; these compounds form inclusion complexes with any drug whose molecule can fit into the lipophile-seeking cavities of the cyclodextrin molecule.

[1654] By amorphous cyclodextrin, it is meant non-crystalline mixtures of cyclodextrins wherein the mixture is prepared from α-, β-, or γ-cyclodextrin. In general the amorphous cyclodextrin is prepared by non-selective additions, especially alkylation of the desired cyclodextrin species. Reactions are carried out to yield mixtures containing a plurality of components thereby preventing crystallization of the cyclodextrin. Various alkylated and hydroxyalkyl cyclodextrins can be made and of course will vary, depending upon the starting species of cyclodextrin and the addition agent used. Among the amorphous cyclodextrins suitable for compositions according to this disclosure are hydroxypropyl, hydroxyethyl, glucosyl, maltosyl and maltotriosyl derivatives of β-cyclodextrin, carboxyamidomethyl-β-cyclodextrin, carboxymethyl-β-cyclodextrin, hydroxypropyl-β-cyclodextrin and diethylamino-β-cyclodextrin. The substituted γ-cyclodextrins may also be suitable, including hydroxypropyl, hydroxyethyl, glucosyl, maltosyl and maltotriosyl derivatives of γ-cyclodextrin.

[1655] The cyclodextrin of the compositions according to this disclosure may be α-, β-, or γ-cyclodextrin. α-cyclodextrin contains six glucopyranose units; β-cyclodextrin contains seven glucopyranose units; and γ-cyclodextrin contains eight glucopyranose units. The molecule is believed to form a truncated cone having a core opening of 4.7-5.3 angstroms, 6.0-6.5 angstroms, and 7.5-8.3 angstroms in α-, β-, or γ-cyclodextrin respectively. The composition according to this disclosure may comprise a mixture of two or more of the α-, β-, or γ-cyclodextrins. Typically, however, the composition according to this disclosure will comprise only one of the α-, β-, or γ-cyclodextrins.

[1656] The unmodified α-, β-, or γ-cyclodextrins are less preferred in the compositions according to this disclosure because the unmodified forms tend to crystallize and are relatively less soluble in aqueous solutions. More preferred for the compositions according to this disclosure are the α-, β-, and γ-cyclodextrins that are chemically modified or substituted. Chemical substitution at the 2, 3 and 6 hydroxyl groups of the glucopyranose units of the cyclodextrin rings yields increases in solubility of the cyclodextrin compound.

[1657] Most preferred cyclodextrins in the compositions according to this disclosure are amorphous cyclodextrin compounds. By amorphous cyclodextrin is meant non-crystalline mixtures of cyclodextrins wherein the mixture is prepared from α-, β-, or γ-cyclodextrin. In general, the amorphous cyclodextrin is prepared by non-selective alkylation of the desired cyclodextrin species. Suitable alkylation agents for this purpose include but are not limited to propylene oxide, glycidol, iodoacetamide, chloroacetate, and 2-diethylaminoethlychloride. Reactions are carried out to yield mixtures containing a plurality of components thereby preventing crystallization of the cyclodextrin. Various alkylated cyclodextrins can be made and of course will vary, depending upon the starting species of cyclodextrin and the alkylating agent used. Among the amorphous cyclodextrins suitable for compositions according to this disclosure are hydroxypropyl, hydroxyethyl, glucosyl, maltosyl and maltotriosyl derivatives of β-cyclodextrin, carboxyamidom ethyl-β-cyclodextrin, carboxymethyl-β-cyclodextrin, hydroxypropyl-β-cyclodextrin and diethylamino-β-cyclodextrin.

[1658] Importantly, if the aqueous solution comprising the therapeutic compound(s) and a cyclodextrin is to be administered parenterally, especially via the intravenous route, a cyclodextrin will be substantially free of pyrogenic contaminants. Various forms of cyclodextrin, such as forms of amorphous cyclodextrin, may be purchased from a number of vendors including Sigma-Aldrich, Inc. (St. Louis, Mo., USA). A method for the production of hydroxypropyl-β-cyclodextrin is disclosed in Pitha et al., U.S. Pat. No. 4,727,064 which is incorporated herein by reference.

[1659] To produce the formulations according to this disclosure, a pre-weighed amount of a cyclodextrin compound, which is substantially pyrogen free is placed in a suitable depyrogenated sterile container. Methods for depyrogenation of containers and closure components are well known to those skilled in the art and are fully described in the United States Pharmacopeia 23 (United States Pharmacopeial Convention, Rockville, Md. USA). Generally, depyrogenation is accomplished by exposing the objects to be depyrogenated to temperatures above 400 degrees Centigrade for a period of time sufficient to fully incinerate any organic matter. As measured in U.S.P. Bacterial Endotoxin Units, the formulation will contain no more than 10 Bacterial Endotoxin Units per gram of amorphous cyclodextrin. By substantially pyrogen free is meant that the cyclodextrin con tains less than 10 U.S.P. bacterial endotoxin units per gram using the U.S.P. method. Preferably, the cyclodextrin will contain between 0.1 and 5 U.S.P. bacterial endotoxin units per mg, under conditions specified in the United States Pharmacopeia 23.

[1660] Sufficient sterile water for injection is added to the substantially pyrogen free amorphous cyclodextrin until the desired concentration of the cyclodextrin is in solution. To this solution a pre-weighed amount of the therapeutic compound(s), optionally a compound(s) of Formula [X], is added with agitation and with additional standing if necessary until it dissolves.

[1661] The solution is then filtered through a sterile 0.22 micron filter into a sterile holding vessel and is subsequently filled in sterile depyrogenated vials and is capped. For products that will be stored for long periods of time, a pharmaceutically acceptable preservative may be added to the solution of therapeutic compound(s) and cyclodextrin prior to filtration, filling and capping or alternatively, may be added sterilely after filtration.

[1662] As discussed above, the present disclosure provides improved water soluble formulations of compound(s) of Formula [X] and methods of preparing and employing such formulations. The advantages of these water soluble formulations are that a drug is entrapped in cyclodextrin in dissolved form. These compositions can be delivered in the form by slow infusions or by bolus injection or by other parenteral or oral delivery routes.

[1663] Additional description of the use of cyclodextrin for solubilizing compounds can be found in US 2005/0026849, the contents of which are incorporated herein by reference.

[1664] In an embodiment, the therapeutic action of a cyclodextrin(s), or derivative(s) thereof, synergizes with the therapeutic action of one or more compounds of Formula [X], or a pharmaceutically acceptable salt, solvate, hydrate or prodrug thereof. For non-limiting example, cyclodextrin(s) can slow aging (delay the onset of an age associated phenotype in a cell) and a compound of Formula [X] can slow aging (delay the onset of an age associated phenotype in a cell) and when co-administered, optionally in a pharmaceutical composition, these anti-aging properties add/synergize. A method of treating or delaying the onset of geriatric aging of the human or animal body, tissue, or organ comprising administering a composition that includes one or more cyclodextrins and one or more compounds of Formula [X] to a subject. A method of preventing, treating or delaying the onset of a disease/condition associated with aging, and/or a lipofuscin associated disorder, by administering a composition that includes one or more of cyclodextrins and one or more compounds of Formula [X] to a subject.

### Fast Melt Formulations

[1665] Rapid disintegration facilitates delivery of the active material. Rapidly disintegrating or dissolving, e.g. oral, dosage forms comprising at least one compound of this disclosure are contemplated. Illustrative teaching upon how to synthesize such is in the patent output of manufacturers including Cima Labs, Fuisz Technologies Ltd., Prographarmn, R. P. Scherer, Yamanouchi-Shaklee, and McNeil-PPC, Inc.

### Animal Feed

[1666] Componentry to this disclosure is to add a compound(s) of Formula [X] to animal feed and/or drinking water/fluid. How such feed premixes and complete rations can be prepared and administered are described in reference books (such as “Applied Animal Nutrition”, W.H. Freedman and CO., San Francisco, U.S.A., 1969 or “Livestock Feeds and Feeding” O and B books, Corvallis, Oreg., U.S.A., 1977).

### Cycling Therapy

[1667] In certain embodiments, the prophylactic/therapeutic agents provided herein are cyclically administered to a subject. Cycling therapy involves the administration of an active agent for a period of time, followed by a rest for a period of time, wherein the rest period equals a day, days, weeks, or months without the compound(s) being administered, before the administration period starts again, and this cycle is repeated over a period of time, optionally wherein the length (and dosage) of the administration and/or rest periods can be modulated, optionally to find the best cycle for the subject. A variant is wherein the rest period isn't complete rest, but the compound(s) is administered at lower dosage. Cycling therapy can reduce the development of resistance to one or more of the therapies, avoid, or reduce the side effects of one of the therapies, and/or improves the efficacy of the treatment. In an embodiment, a cycle of administration with one or more compounds of Formula [X] is implemented completely out of phase, or with a degree of overlap, with a cycle of administration of one or more other compounds of Formula [X], or another drug approved for human use by the regulatory body applicable to the country that the subject resides e.g. the FDA applies for a subject in the USA.

### Optimising for Brain/CNS Administration

[1668] Delivery approaches can be used to deliver therapeutic agents to the brain whilst circumventing the blood-brain barrier. Some such approaches can utilize intrathecal injections, surgical implants (Ommaya, Cancer Drug Delivery, 1:169-178(1984) and U.S. Pat. No. 5,222,982), interstitial infusion (Bobo et al., Proc. Natl. Acad. Sci. U.S.A., 91:2076-2080(1994)), and the like. These strategies deliver an agent to the CNS by direct administration into the cerebrospinal fluid (CSF) or into the brain parenchyma (ECF).

[1669] Drug delivery to the central nervous system through the cerebrospinal fluid can be achieved, for example, by means of a subdurally implantable device the “Ommaya reservoir”. The drug is injected into the device and subsequently released into the cerebrospinal fluid surrounding the brain. It can be directed toward specific areas of exposed brain tissue which then adsorb the drug. This adsorption is limited since the drug does not travel freely. A modified device, whereby the reservoir is implanted in the abdominal cavity and the injected drug is transported by cerebrospinal fluid (taken from and returned to the spine) to the ventricular space of the brain, is used for agent administration. Through omega-3 derivatization, site-specific biomolecular complexes can overcome the limited adsorption and movement of therapeutic agents through brain tissue.

[1670] Another strategy to improve agent delivery to the CNS is by increasing the agent absorption (adsorption and transport) through the blood-brain barrier and the uptake of therapeutic agent by the cells (Broadwell, Acta Neuropathol., 79:117-128(1989); Pardridge et al., J. Pharmacol. Experim. Therapeutics, 255:893-899(1990); Banks et al., Progress in Brain Research, 91:139-148(1992); Pardridge, Fuel Homeostasis and the Nervous System, ed.: Vranic et al., Plenum Press, New York, 43-53(1991)). The passage of agents through the blood-brain barrier to the brain can be enhanced by improving either the permeability of the agent itself or by altering the characteristics of the blood-brain barrier. Thus, the passage of the agent can be facilitated by increasing its lipid solubility through chemical modification, and/or by its coupling to a cationic carrier, or by its covalent coupling to a peptide vector capable of transporting the agent through the blood-brain barrier. Peptide transport vectors are also known as blood-brain barrier permeabilizer compounds (U.S. Pat. No. 5,268,164). Site specific macromolecules with lipophilic characteristics useful for delivery to the brain are described in U.S. Pat. No. 6,005,004. Other examples (U.S. Pat. Nos. 4,701,521, and 4,847,240) describe a method of covalently bonding an agent to a cationic macromolecular carrier which enters into the cells at relatively higher rates. These patents teach enhancement in cellular uptake of bio-molecules into the cells when covalently bonded to cationic resins. U.S. Pat. No. 4,046,722 discloses anti-cancer drugs covalently bonded to cationic polymers for the purpose of directing them to cells bearing specific antigens. The polymeric carriers have molecular weights of about 5,000 to 500,000. Such polymeric carriers can be employed to deliver compounds described herein in a targeted manner.

### Kits

[1671] The present disclosure also encompasses an article of manufacture. As used herein, article of manufacture is intended to include, but not be limited to, kits and packages. The kit may comprise multiple internal containers to keep components separate. An article of manufacture of the present disclosure, comprises: (a) a first container (most preferably sterilised, sterilization methodology well known to those skilled in the art, and packaged/sealed to maintain sterilization; optionally it is a blister pack, wherein this term and its meaning is well known in the art); (b) a pharmaceutical composition located within the first container, wherein the composition, comprises: a first therapeutic agent, comprising: a compound of the present disclosure or a pharmaceutically acceptable salt form thereof; and, (c) a package insert stating that the pharmaceutical composition can be used for the treatment of a specified disease(s)/disorder(s)/condition(s) in a subject, optionally stating the treatment of a disease(s)/disorder(s)/condition(s) refered to herein, optionally stating the treatment of cancer. In another embodiment, the package insert states that the pharmaceutical composition can be used in combination (as defined previously) with a second therapeutic agent(s) to treat the same specified disease(s)/disorder(s) in a subject, optionally wherein this is cancer. The article of manufacture can further comprise: (d) a second container, wherein components (a) and (b) are located within the second container and component (c) is located within or outside of the second container. Located within the first and second containers means that the respective container holds the item within its boundaries.

[1672] The first container is a receptacle used to hold a pharmaceutical composition. This container can be for manufacturing, storing, shipping, and/or individual/bulk selling. First container is intended to cover a bottle, jar, vial, flask, syringe, tube (e.g., for a cream preparation), or any other container used to manufacture, hold, store, or distribute a pharmaceutical product.

[1673] The second container is one used to hold the first container and, optionally, the package insert. Examples of the second container include, but are not limited to, boxes (e.g., cardboard or plastic), crates, cartons, bags (e.g., paper or plastic bags), pouches, and sacks. The package insert can be physically attached to the outside of the first container via tape, glue, staple, or another method of attachment, or it can rest inside the second container without any physical means of attachment to the first container. Alternatively, the package insert is located on the outside of the second container. When located on the outside of the second container, it is preferable that the package insert is physically attached via tape, glue, staple, or another method of attachment. Alternatively, it can be adjacent to or touching the outside of the second container without being physically attached.

[1674] The package insert is a label, tag, marker, etc. that recites information relating to the pharmaceutical composition located within the first container. The information recited will usually be determined by the regulatory agency governing the area in which the article of manufacture is to be sold (e.g., the United States Food and Drug Administration). Preferably, the package insert specifically recites the indications for which the pharmaceutical composition has been approved. The package insert may be made of any material on which a person can read information contained therein or thereon. Preferably, the package insert is a printable material (e.g., paper, plastic, cardboard, foil, adhesive-backed paper or plastic, etc.) on which the desired information has been formed (e.g., printed or applied). Information may be provided by reference to a website(s).

[1675] Herein disclosed are articles of manufacture that include a compound(s) and/or pharmaceutical composition(s) described herein in a suitable container. The container may be a vial, jar, ampoule, preloaded syringe, intravenous bag or other used for containing a drug for human or veterinary use. Disclosed herein are kits that include a compound(s) of this disclosure, or a pharmaceutically acceptable salt, solvate, hydrate or prodrug thereof, and suitable packaging, optionally with a package insert, optionally a paper package insert. In some embodiments, a kit further includes instructions for use, which can be upon a package insert. In some embodiments, a kit includes a compound(s) of this disclosure, or a pharmaceutically acceptable salt, solvate, hydrate or prodrug thereof, packaging and a label and/or instructions for use of the compound(s)/composition(s) in the treatment/amelioration/prevention/combating of indications, optionally including one or more diseases/disorders/conditions described herein. Pharmaceutical compound(s)/composition(s) of this disclosure can be inside one or more embodiments of a container/pack/package/dispenser, optionally together with instructions for administration, optionally with drug information such as, for example, disease(s)/disorder(s)/condition(s) treated/ameliorated/prevented/combated, possible side-effects, desirable or undesirable/dangerous drug interactions possible in the subject, information related to what to do upon overdose, and any information specified for inclusion according to the relevant regulatory authority e.g. the FDA in the USA, and optionally wherein each dose (e.g. daily) of compound(s)/composition(s) is compartmentalized in its own compartment or discrete storage within a bigger package, optionally labelled (e.g. with day of week). For example, a packaged product may comprise a container; an effective amount of a compound(s) of this disclosure; and an insert associated with the container, indicating administering the compound(s) for treating a disorder(s), optionally cancer. The composition(s) of the kit may be provided as any suitable form. The kits may contain instructions for mixing, diluting, and/or administrating the compounds. In certain embodiments, the kit provided herein further comprises a device that is used to administer the active ingredients. Examples of such devices include, but are not limited to, syringes, drip bags, patches, and inhalers. The kits also can include other container(s) with pharmaceutically acceptable vehicle(s) that can be used to administer one or more active ingredients, such as one or more solvents, surfactants, preservatives, and/or diluents (e.g., normal saline (0.9% NaCl), or 5% dextrose) as well as containers for mixing, diluting or administering the components to the subject in need of such treatment. When the composition provided is a dry powder, the powder may be reconstituted by the addition of a suitable solvent, which may also be provided. In embodiments where liquid forms of the composition are sued, the liquid form may be concentrated or ready to use. The solvent will depend on the compound and the mode of use or administration. Suitable solvents for drug compositions are well known and are available in the literature. In a particular embodiment, the solution for administering the compound is sterilised. In some embodiments, the package insert instructs a user of the kit to administer the compound or pharmaceutical composition to a subject. In some embodiments, the package insert instructs a user of the kit to mix the compound or pharmaceutical composition with an aqueous solution. In some embodiments, the package insert instructs a user of the kit to orally administer the compound to the subject. The kits may further comprise conventional pharmaceutical kit components which will be readily apparent to those skilled in the art. Optionally the kit contains a compound(s) of Formula [X] and a further compound or compounds approved for human use by the FDA and/or EMA, for example an anti-cancer drug(s), and optionally instructions for administrating the compounds contained therein to a subject, optionally with materials to perform or assist said administration.

### Polymorphs

[1676] In certain embodiments, a compound(s) of Formula [X] is a solid. In certain embodiments, a solid compound(s) of Formula [X] is amorphous (lacks long-range order at the molecular level). In certain embodiments, a solid compound(s) of Formula [X] is crystalline. The term ‘crystalline’ refers to a solid phase in which the material has a regular ordered internal structure at the molecular level and gives a distinctive X-ray diffraction pattern with defined peaks. Compounds of the present disclosure may exist as polymorphs. As used herein “polymorph” refers to crystalline forms having the same chemical composition but different spatial arrangements of the molecules, and/or ions forming the crystal. Co-crystals are typically defined as crystalline complexes of neutral molecular constituents that are bound together through non-covalent interactions, but could also be a complex of a neutral molecule with a salt. Co-crystals may be prepared by melt crystallization, by recrystallization from solvents, or by physically grinding the components together; see O. Almarsson and M. J. Zaworotko, Chem. Commun. 2004, 17, 1889-1896. For a general review of multi-component complexes, see J. K. Haleblian, J. Pharm. Sci. 1975, 64, 1269-1288. Reference to a compound of the Formula [X] herein is understood to include reference to amorphous/crystal/polymorph/co-crystal/clathrate form thereof, unless specified otherwise or otherwise clear from context. A polymorph(s) of a compound(s), or a polymorph of a salt/solvate/hydrate/prodrug of at least one compound of at least one of Formula (I), (II), (III), (IV), (V), (VI), (VII), (VIII), [X], and/or a polymorph(s) of another compound(s) that reduces F₁F₀ ATP hydrolysis, is componentry to this disclosure, as is its incorporation, optionally of a therapeutically effective amount, into a pharmaceutically acceptable composition, optionally with a further polymorph(s) and/or compound(s) of this disclosure, optionally with an FDA and/or EMA approved therapeutic(s). A disclosure embodiment is the use of a polymorph(s) of this disclosure for the manufacture of a medicament for the treatment, amelioration, prevention or combating of a disease or disorder, optionally one or more diseases/disorders/conditions referred to herein. A disclosure embodiment is the use of one or more of these polymorph(s)/composition(s) for use in a method of treatment of the human or animal body by therapy, optionally to treat/ameliorate/prevent/combat one or more diseases/disorders/conditions referred to herein, optionally cancer. In some embodiments, the subject is further administered with one or more compounds or compositions approved for human use, optionally for anti-cancer use, by the United States Food and Drug Administration (FDA) and/or European Medicines Agency (EMA), optionally in the same pharmaceutical composition. An aspect of this disclosure is a pharmaceutical composition comprising at least one polymorph of a compound as described herein and a pharmaceutically-acceptable carrier or diluent.

[1677] The crystalline forms may be prepared by a variety of methods, including for example, crystallization or recrystallization from a suitable solvent, sublimation, growth from a melt, solid state transformation from another phase, crystallization from a supercritical fluid, and jet spraying. Techniques for crystallization or recrystallization of crystalline forms from a solvent mixture include, for example, evaporation of the solvent, decreasing the temperature of the solvent mixture, crystal seeding a supersaturated solvent mixture of the molecule and/or salt, freeze drying the solvent mixture, and addition of antisolvents (countersolvents) to the solvent mixture. High throughput crystallization techniques may be employed to prepare crystalline forms including polymorphs.

[1678] Crystals of drugs, including polymorphs, methods of preparation, and characterization of drug crystals are discussed in Solid-State Chemistry of Drugs, S. R. Bym, R. R. Pfeiffer, and J. G. Stowell, 2^{nd} Edition, SSCI, West Lafayette, Ind., 1999.

### Co-Administration

[1679] A compound(s) of Formula [X] can be combined with one or more other pharmacologically active compounds (“second active agents”) in methods and compositions provided herein. As used herein, the term “co-administration” refers to the administration of at least two agent(s)/therapies, one or more of which is a compound or composition of the present disclosure. In some embodiments, the co-administration of two or more agents/therapies is concurrent. In other embodiments, a first agent/therapy is administered prior to a second agent/therapy. Those of skill in the art understand that the formulations and/or routes of administration of the various agents/therapies used may vary. The appropriate dosage for co-administration can be readily determined by one skilled in the art. In some embodiments, when agents/therapies are co-administered, the respective agents/therapies are administered at lower dosages than appropriate for their administration alone. Thus, co-administration is especially desirable in embodiments where the co-administration of the agents/therapies lowers the requisite dosage of a known potentially harmful (e.g., toxic) agent(s). The use of multiple compounds to treat an indication can increase the beneficial effects while reducing the presence of side effects.

[1680] The compounds of the present disclosure may be administered individually, in combination with each other, and/or in combination with other pharmaceuticals/treatments useful for treating the disease or condition of interest. When administered in combination, each component may be administered at the same time or sequentially in any order at different points in time. Thus, each component may be administered separately but sufficiently closely in time so as to provide the desired therapeutic effect, in a way that the therapeutical effects of the first administered one is not entirely dissipated when the subsequent is administered. In one embodiment, the component medications are coformulated for convenience (e.g. in the same injectable or ingestible composition). In an alternative embodiment, the component medications are packaged/distributed/sold/promoted/advertised together.

### Scope

[1681] The examples of this disclosure are provided to better illustrate the claimed disclosure and are not to be interpreted in any way as limiting the scope of the disclosure. These specific compounds, compositions, materials, methods and kits are not intended to limit the disclosure, but merely to illustrate specific embodiments falling within the scope of the disclosure. One skilled in the art may develop equivalent compounds, compositions, materials, and methods without the exercise of inventive capacity and without departing from the scope of the disclosure. It is therefore to be understood that within the scope of the appended claims, the disclosure may be practiced otherwise than as specifically described herein. It will be understood that many variations can be made in the procedures herein described while still remaining within the bounds of the disclosure. It is the intention of the inventor that such variations are included within the scope of the disclosure. The present disclosure may be embodied in other specific forms without departing from the spirit or essential attributes thereof. This disclosure encompasses all combinations of preferred aspects of the disclosure noted herein. It is understood that any and all embodiments of the present disclosure may be taken in conjunction with any other embodiment or embodiments to describe additional embodiments. It is also to be understood that each individual element of the embodiments is its own independent embodiment. Furthermore, any element of an embodiment is meant to be combined with any and all other elements from any embodiment to describe an additional embodiment. Feature(s) described in connection with one embodiment of the disclosure may be used in conjunction with another embodiment(s), even if not explicitly stated. Any/all of the features described herein (including any accompanying claims, abstract and drawings), and/or all/some of the steps of any method or process so disclosed, may be combined with any of the above aspects in any combination.

### EQUIVALENTS

[1682] Those skilled in the art will recognize, or be able to ascertain using no more than routine experimentation, many equivalents to the specific embodiments of the disclosure described herein. Such equivalents are componentry to this disclosure.

### Abbreviations

[1683] All abbreviations used in this disclosure are standard/used in the art, familiar/discernable to a person of the art, especially in their context, to illustrate: Ph=phenyl; Bn=benzyl; Me=methyl; Et=ethyl; MeOH=methanol; EtOH=ethanol; Pr=propyl; Bu=butyl; PE=petroleum ether; COOEt=ethoxycarbonyl; CO2Et=ethoxycarbonyl; Et3SiH=triethylsilane; LiAlH4=lithium aluminium hydride; ACN=acetonitrile=CH₃CN; AcOH=acetic acid; HOAc=acetic acid; Mel=CH₃I; Boc=tert-butyloxycarbonyl protecting group; CDI=1,1′-carbonyldiimidazole; DCE=1,2-Dichloroethane; DCM=dichloromethane; DBU=1,8-diazabicyclo[5,4,0] undec-7-ene; DMAP=4-Dimethylaminopyridine; DMF=N,N-dimethylformamide; DPPA=Diphenylphosphoryl azide; EDCl=N-(3-dimethylaminopropyl)-N′-ethylcarbodiimide hydrochloride or 1-Ethyl-3-(3-dimethylaminopropyl) carbodiimide; EtOAc=ethyl acetate; HEPES=4-(2-hydroxyethyl)-1-piperazineethanesulfonic acid; IBX=2-iodoxybenzoic acid; IPA=isopropanol; MEI=methyl iodide; Tf₂O=triflic anhydride; NaBH (OAc)3=sodium triacetoxyborohydride; NCS═N═C═S; R_{f}=retention value; t-BuOK=potassium tert-butoxide; TEA=triethylamine=Et3N; THF=tetrahydrofuran; TFA=trifluoroacetic acid; TFAA=trifluoroacetic anhydride; T3P=Propanephosphonic acid anhydride; HATU=Hexafluorophosphate Azabenzotriazole Tetramethyl Uronium; HOBt=Hydroxybenzotriazole; TBAF=Tetra-n-butylammonium Fluoride; Cbz=carboxybenzyl group; TBA=Tertiary butyl alcohol; TLC=thin-layer chromatography; SFC=supercritical fluid chromatography or chiral supercritical fluid chromatography; IPAm=isopropylamine; Tol or Tol.=toluene or tolyl; SM=starting material; min=minute(s); h or hr=hour(s); aq. or aq=aqueous.

### SOME PATENTS, OR PATENT APPLICATIONS, CITED

[1684] [P1] Atwal K S, Grover G J, Ding C Z, Stein P D, Lloyd J, Ahmad S, Hamann L G, Green D, Ferrara F N, inventors; Bristol-Myers Squibb Co., assignee. (1-phenyl-2-heteoaryl)ethyl-guanidine compounds as inhibitors of mitochondrial F1F0 ATP hydrolase. United States patent U.S. Pat. No. 6,916,813. 2005 Jul. 12. [P2] Ding C, Hamann L, Stein P, Pudzianowski A, inventors; Ding Charles Z., Hamann Lawrence G., Stein Philip D., Pudzianowski Andrew T., assignee. Benzodiazepine inhibitors of mitochondial F1F0 ATP hydrolase and methods of inhibiting F1F0 ATP hydrolase. United States patent application U.S. Ser. No. 10/461,736. 2003 Jun. 13. [P3] Hamann L G, Pudzianowski A T, inventors; Bristol-Myers Squibb Company, assignee. N-substituted phenylurea inhibitors of mitochondrial F1F0 ATP hydrolase. United States patent U.S. Pat. No. 6,846,836. 2005 Jan. 25. [P4] Glick G D, inventor; University of Michigan, assignee. Methods and compositions for treating diseases and conditions associated with mitochondrial function. United States patent application U.S. Ser. No. 11/726,219. 2009 Nov. 5. [P5] Glick G, inventor; University of Michigan, assignee. Methods and compositions for treating diseases and conditions associated with mitochondrial function. United States patent application U.S. Ser. No. 11/110,228. 2005 Dec. 8. [P6] Ding C Z, Atwal K S, inventors; Bristol-Myers Squibb Company, assignee. Sulfonamido substituted benzopyran derivatives. United States patent U.S. Pat. No. 5,869,478. 1999 Feb. 9. [P7] Regnier G, Canevari R, Laubie M, inventors; En Nom Collectif Science Union, Medicale Rech France, assignee. S-triazine compounds. United States patent U.S. Pat. No. 3,647,794. 1972 Mar. 7. [P8] Dax S L, Woodward R, Peng S, inventors; Galleon Pharmaceuticals Inc, assignee. Compounds as respiratory stimulants for treatment of breathing control disorders or diseases. United States patent U.S. Pat. No. 9,351,972. 2016 May 31. [P9] Regnier G, Dhainaut A, Laubie M, Duhault J, inventors; ADIR et Cie, assignee. Disubstituted polymethylene imines. United States patent U.S. Pat. No. 4,514,398. 1985 Apr. 30. [P10] Reginier G, Laubie M, Duhault J, inventors; ADIR et Cie, assignee. Piperazine and homopiperazine compounds. United States patent U.S. Pat. No. 4,492,696. 1985 Jan. 8. [P11] Regnier G, Dhainaut A, Laubie M, Duhault J, inventors; ADIR et Cie, assignee. NN′substituted polymethylene diamines. United States patent U.S. Pat. No. 4,514,399. 1985 Apr. 30. [P12] Regnier G, Dhainaut A, Laubie M, Duhault J, Roman F, inventors; ADIR et Cie, assignee. Anti-hypoxic disubstituted polymethylene imine derivatives, compositions, and method of use therefor. United States patent U.S. Pat. No. 4,593,026. 1986 Jun. 3. [P13] CN105693806A. Chinese patent application. [P14] Christen M Anderson, William Clevenger. Compositions and methods for regulating endogenous inhibitor of ATP synthase, including treatment for diabetes. United States patent application. US 2003/0026781 A1. Published 2003 Feb. 6.

### NON-PATENT REFERENCES

[1685] [1] Stryer L, Berg J M, Tymoczko J L (2002) Biochemistry, 4^{th} Ed. New York, NY: WH Freeman. [2]Alberts B, Johnson A, Lewis J, Raff M, Roberts K, Walter P (1994) Molecular Biology Of The Cell, 3^{rd} Ed. New York, NY: Garland Publishing. [3] Nicholls D G, Ferguson S (2013) Bioenergetics. Academic Press. [4] Hong S, Pedersen P L (2008) ATP synthase and the actions of inhibitors utilized to study its roles in human health, disease, and other scientific areas. Microbiology and Molecular Biology Reviews 72(4):590-641. [5] Marvin cheminformatics suite (version 16.3.21; academic license; ChemAxon Kft., Budapest, Hungary; www.chemaxon.com). [6] Gordon C J (2012) Thermal physiology of laboratory mice: Defining thermoneutrality. Journal of Thermal Biology. 37(8):654-85. [7] Ivanes F (2013) New mechanisms of protection of cardiomyocytes from ischemia/reperfusion injury (Doctoral dissertation, Université Claude Bernard-Lyon I). [8] Atwal K S, Ahmad S, Ding C Z, Stein P D, Lloyd J, Hamann L G, Green D W, Ferrara F N, Wang P, Rogers W L, Doweyko L M, Miller A V, Bisaha S N, Schmidt J B, Li L, Yost K J, Lan H J, Madsen C S (2004)N-[1-Aryl-2-(1-imidazolo)ethyl]-guanidine derivatives as potent inhibitors of the bovine mitochondrial F Fo ATP hydrolase. Bioorg. Med. Chem. Lett. 141027-1030. [9] Atwal K S, Wang P, Rogers W L, Sleph P, Monshizadegan H, Ferrara F N, Traeger S, Green D W, Grover G J (2004) Small molecule mitochondrial F Fo ATPase hydrolase inhibitors as cardioprotective agents. Identification of 4-(N-arylimidazole)-substituted benzopyran derivatives as selective hydrolase inhibitors. J. Med. Chem. 471081-1084. INCLUDING this paper's supplementary material. [10] Hamann L G, Ding C Z, Miller A V, Madsen C S, Wang P, Stein P D, Pudzianowski A T, Green D W, Monshizadegan H, Atwal K S (2004) Benzodiazepine-based selective inhibitors of mitochondrial F₁F₀ ATP hydrolase. Bioorg. Med. Chem. Lett. 141031-1034. [11] Grover G J, Atwal K S, Sleph P G, Wang F L, Monshizadegan H, Monticello T, Green D W (2004) Excessive ATP hydrolysis in ischemic myocardium by mitochondrial F1F0-ATPase: effect of selective pharmacological inhibition of mitochondrial ATPase hydrolase activity. American Journal of Physiology-Heart and Circulatory Physiology 287(4):H1747-H1755. [12] Ivanes F, Faccenda D, Gatliff J, Ahmed A A, Cocco S, Cheng CHK, . . . & Campanella M (2014) The compound BTB06584 is an IF1-dependent selective inhibitor of the mitochondrial F1Fo-ATPase. British journal of pharmacology 171(18):4193-4206. [13] Zheng J, Ramirez V D (2000) Inhibition of mitochondrial proton FOF1-ATPase/ATP synthase by polyphenolic phytochemicals. British journal of pharmacology. 130(5):1115-23. [14] Yin X, Giap C, Lazo J S, et al. (2003) Low molecular weight inhibitors of Myc-Max interaction and function. Oncogene. 22(40):6151-9. [15] Ng J, Shuryak I (2015) Minimizing second cancer risk following radiotherapy: current perspectives. Cancer management and research. 7:1. [16] Armstrong G T, Kawashima T, Leisenring W, Stratton K, Stovall M, Hudson M M, Sklar C A, Robison L L, Oeffmger K C (2014) Aging and risk of severe, disabling, life-threatening, and fatal events in the childhood cancer survivor study. Journal of clinical oncology. 32(12):1218. [17] Castro R F, Azzalis L A, Feder D, Perazzo F F, Pereira E C, Junqueira V B, Rocha K C, Machado C D, Paschoal F C, Gnann L A, Fonseca F L (2012) Safety and efficacy analysis of liposomal insulin-like growth factor-1 in a fluid gel formulation for hair-loss treatment in a hamster model. Clinical and Experimental Dermatology: Experimental dermatology. 37(8):909-12. [18] Patel A, Cholkar K, Agrahari V, Mitra A K (2013) Ocular drug delivery systems: an overview. World journal of pharmacology. 2(2):47. [19] Gaudana R, Ananthula H K, Parenky A, Mitra A K (2010) Ocular drug delivery. The AAPS journal. 12(3):348-60. [20] Mitra A K, Anand B S, Duvvuri S (2005) Drug delivery to the eye. Advances in Organ Biology. 10:307-51. [21] Wong W L, Su X, Li X, Cheung C M, Klein R, Cheng C Y, Wong T Y (2014) Global prevalence of age-related macular degeneration and disease burden projection for 2020 and 2040: a systematic review and meta-analysis. The Lancet Global Health. 2(2):e106-16. [22] Hao J, Li S K (2019) Inner ear drug delivery: Recent advances, challenges, and perspective. European Journal of Pharmaceutical Sciences. 126:82-92. [23] Liu H, Hao J, Li K S (2013) Current strategies for drug delivery to the inner ear. Acta Pharmaceutica Sinica B. 3(2):86-96. 1241 Lin M T, Beal M F (2006) Mitochondrial dysfunction and oxidative stress in neurodegenerative diseases. Nature. 443(7113):787-95. [25] Umphred D A, Lazaro R T, Roller M, Burton G, editors Neurological rehabilitation. Elsevier Health Sciences; 2013 Aug 7. [26] Kang Y S, Jung H J, Oh J S, Song D Y (2016) Use of PEGylated Immunoliposomes to Deliver Dopamine Across the Blood-Brain Barrier in a Rat Model of Parkinson's Disease. CNS Neuroscience & Therapeutics. 22(10):817-23. [27] Di Gioia S, Trapani A, Mandracchia D, De Giglio E, Cometa S, Mangini V, Arnesano F, Belgiovine G, Castellani S, Pace L, Lavecchia M A (2015) Intranasal delivery of dopamine to the striatum using glycol chitosan/sulfobutylether-β-cyclodextrin based nanoparticles. European Journal of Pharmaceutics and Biopharmaceutics. 94:180-93. [28] Oorschot D E. Total number of neurons in the neostriatal, pallidal, subthalamic, and substantia nigral nuclei of the rat basal ganglia: a stereological study using the cavalieri and optical disector methods. J Comp Neurol. 1996; 366:580-599. [29] Naoi M, Maruyama W (1999) Cell death of dopamine neurons in aging and Parkinson's disease. Mechanisms of ageing and development. 111(2):175-88. [30] Marschner J A, Schäfer H, Holderied A, Anders H J (2016) Optimizing mouse surgery with online rectal temperature monitoring and preoperative heat supply. Effects on post-ischemic acute kidney injury. PLoS One. 1 1(2):e0149489. [31] Strong R, Miller R A, Astle C M, Baur J A, De Cabo R, Fernandez E, Guo W, Javors M, Kirkland J L, Nelson J F, Sinclair D A (2012) Evaluation of resveratrol, green tea extract, curcumin, oxaloacetic acid, and medium-chain triglyceride oil on life span of genetically heterogeneous mice. Journals of Gerontology Series A: Biomedical Sciences and Medical Sciences. 68(1):6-16. [32] Harrison D E, Strong R, Sharp Z D, Nelson J F, Astle C M, Flurkey K, Nadon N L, Wilkinson J E, Frenkel K, Carter C S, Pahor M (2009) Rapamycin fed late in life extends lifespan in genetically heterogeneous mice. Nature. 460(7253):392. [33] Colman R J, Anderson R M, Johnson S C, Kastman E K, Kosmatka K J, Beasley T M, Allison D B, Cruzen C, Simmons H A, Kemnitz J W, Weindruch R (2009) Caloric restriction delays disease onset and mortality in rhesus monkeys. Science. 325(5937):201-4. [34] Ackert-Bicknell C L, Anderson L C, Sheehan S, Hill W G, Chang B, Churchill G A, Chesler E J, Korstanje R, Peters L L (2017) Aging research using mouse models. Current protocols in mouse biology. 5(2):95-133. [35] Sukoff Rizzo S J, Anderson L C, Green T L, McGarr T, Wells G, Winter S S (2018) Assessing Healthspan and Lifespan Measures in Aging Mice: Optimization of Testing Protocols, Replicability, and Rater Reliability. Current Protocols in Mouse Biology. 8(2):e45. [36] Richardson A, Fischer K E, Speakman J R, De Cabo R, Mitchell S J, Peterson C A, Rabinovitch P, Chiao Y A, Taffet G, Miller R A, Renterfa R C (2015) Measures of healthspan as indices of aging in mice—a recommendation. Journals of Gerontology Series A: Biomedical Sciences and Medical Sciences. 71(4):427-30. Refer especially to this paper's Supplementary Material. [37] Vermeij W P, Hoeij makers J H, Pothof J (2016) Genome integrity in aging: human syndromes, mouse models, and therapeutic options. Annual review of pharmacology and toxicology. 56:427-45. [38] Harkema L, Youssef S A, de Bruin A (2016) Pathology of mouse models of accelerated aging. Veterinary pathology. 53(2):366-89. [39] Hasty P, Campisi J, Hoeijmakers J, Van Steeg H, Vijg J (2003) Aging and genome maintenance: lessons from the mouse?Science. 299(5611):1355-9. [40] de Boer J, Hoeijmakers J H (1999) Cancer from the outside, aging from the inside: mouse models to study the consequences of defective nucleotide excision repair. Biochimie. 81(1-2):127-37. [41] Baker D J, Jeganathan K B, Cameron J D, Thompson M, Juneja S, Kopecka A, Kumar R, Jenkins R B, De Groen P C, Roche P, Van Deursen J M (2004) BubR1 insufficiency causes early onset of aging-associated phenotypes and infertility in mice. Nature genetics. 36(7):744. [42] de Boer J, de Wit J, van Steeg H, Berg R J, Morreau H, Visser P, Lehmann A R, Duran M, Hoeijmakers J H, Weeda G (1998) A mouse model for the basal transcription/DNA repair syndrome trichothiodystrophy. Molecular cell. 1(7):981-90. [43] De Boer J, Andressoo J O, de Wit J, Huijmans J, Beems R B, van Steeg H, Weeda G, van der Horst G T, van Leeuwen W, Themmen A P, Meradji M (2002) Premature aging in mice deficient in DNA repair and transcription. Science. 296(5571):1276-9. [44] Andressoo J O, Mitchell J R, de Wit J, Hoogstraten D, Volker M, Toussaint W, Speksnijder E, Beems R B, van Steeg H, Jans J, de Zeeuw C I (2006) An Xpd mouse model for the combined xeroderma pigmentosum/Cockayne syndrome exhibiting both cancer predisposition and segmental progeria. Cancer cell. 10(2):121-32. [45] Cheo D L, Ruven H J, Meira L B, Hammer R E, Burns D K, Tappe N J, van Zeeland A A, Mullenders L H, Friedberg E C (1997) Characterization of defective nucleotide excision repair in XPC mutant mice. Mutation Research/Fundamental and Molecular Mechanisms of Mutagenesis. 374(1):1-9. [46] Melis J P, Wijnhoven S W, Beems R B, Roodbergen M, Van Den Berg J, Moon H, Friedberg E, Van Der Horst G T, Hoeijmakers J H, Vijg J, Van Steeg H (2008) Mouse models for xeroderma pigmentosum group A and group C show divergent cancer phenotypes. Cancer research. 68(5):1347-53. [47] Niedernhofer U, Garinis G A, Raams A, Lalai A S, Robinson A R, Appeldoorn E, Odijk H, Oostendorp R, Ahmad A, Van Leeuwen W, Theil A F (2006) A new progeroid syndrome reveals that genotoxic stress suppresses the somatotroph axis. Nature. 444(7122):1038. [48] Weeda G, Donker I, de Wit J, Morreau H, Janssens R, Vissers C, Nigg A, van Steeg H, Bootsma D, Hoeijmakers J H (1997) Disruption of mouse ERCC1 results in a novel repair syndrome with growth failure, nuclear abnormalities and senescence. Current Biology. 7(6):427-39. [49] Spoor M, Nagtegaal A P, Ridwan Y, Borgesius N Z, van Alphen B, van der Pluijm I, Hoeijmakers J H, Frens M A, Borst J G (2012) Accelerated loss of hearing and vision in the DNA-repair deficient Ercc1δ/− mouse. Mechanisms of ageing and development. 133(2-3):59-67. [50] Vogel H, Lim D S, Karsenty G, Finegold M, Hasty P (1999) Deletion of Ku86 causes early onset of senescence in mice. Proceedings of the National Academy of Sciences. 96(19):10770-5. [51] Reiling E, Dolld M E, Youssef S A, Lee M, Nagarajah B, Roodbergen M, De Bruin A, Hoeijmakers J H, Vijg J, Van Steeg H, Hasty P (2014) The progeroid phenotype of Ku80 deficiency is dominant over DNA-PKCS deficiency. PloS one. 9(4):e93568. [52] Zhang Y, Padalecki S S, Chaudhuri A R, De Waal E, Goins B A, Grubbs B, Ikeno Y, Richardson A, Mundy G R, Herman B (2007) Caspase-2 deficiency enhances aging-related traits in mice. Mechanisms of ageing and development. 128(2):213-21. [53] Bergeron L, Perez G I, Macdonald G, Shi L, Sun Y, Jurisicova A, Varmuza S, Latham K E, Flaws J A, Salter J C, Hara H (1998) Defects in regulation of apoptosis in caspase-2-deficient mice. Genes & development. 12(9):1304-14. [54] Nadon N L, Strong R, Miller R A, Nelson J, Javors M, Sharp Z D, Peralba J M, Harrison D E (2008) Design of aging intervention studies: the NIA interventions testing program. Age. 30(4):187-99. [55] Miller R A, Harrison D E, Astle C M, Floyd R A, Flurkey K, Hensley K L, Javors M A, Leeuwenburgh C, Nelson J F, Ongini E, Nadon N L (2007) An aging interventions testing program: study design and interim report. Aging cell. 6(4):565-75. [56] Martin-Montalvo A, Mercken E M, Mitchell S J, Palacios H H, Mote P L, Scheibye-Knudsen M, Gomes A P, Ward T M, Minor R K, Blouin M J, Schwab M (2013) Metformin improves healthspan and lifespan in mice. Nature communications. 4:2192. [57] Miller R A, Harrison D E, Astle C M, Baur J A, Boyd A R, De Cabo R, Fernandez E, Flurkey K, Javors M A, Nelson J F, Orihuela C J (2011) Rapamycin, but not resveratrol or simvastatin, extends life span of genetically heterogeneous mice. The Journals of Gerontology: Series A. 66(2):191-201. [58] Strong R, Miller R A, Astle C M, Floyd R A, Flurkey K, Hensley K L, Javors M A, Leeuwenburgh C, Nelson J F, Ongini E, Nadon N L (2008) Nordihydroguaiaretic acid and aspirin increase lifespan of genetically heterogeneous male mice. Aging cell. 7(5):641-50. [59] Baur J A, Pearson K J, Price N L, Jamieson H A, Lerin C, Kalra A, Prabhu V V, Allard J S, Lopez-Lluch G, Lewis K, Pistell P J (2006) Resveratrol improves health and survival of mice on a high-calorie diet. Nature. 444(7117):337. [60] Spilman P, Podlutskaya N, Hart M J, Debnath J, Gorostiza O, Bredesen D, Richardson A, Strong R, Galvan V (2010) Inhibition of mTOR by rapamycin abolishes cognitive deficits and reduces amyloid-p levels in a mouse model of Alzheimer's disease. PloS one. 5(4):e9979. [61] Morley J E, Armbrecht H J, Farr S A, Kumar V B (2012) The senescence accelerated mouse (SAMP8) as a model for oxidative stress and Alzheimer's disease. Biochimica et Biophysica Acta (BBA)-Molecular Basis of Disease. 1822(5):650-6. [62] Peto M V, De la Guardia C, Winslow K, Ho A, Fortney K, Morgen E (2017) MortalityPredictors.org: a manually-curated database of published biomarkers of human all-cause mortality. Aging (Albany NY). 9(8):1916. [63] Cheng D, Logge W, Low J K, Garner B, Karl T (2013) Novel behavioural characteristics of the APP Swe/PS1ΔE9 transgenic mouse model of Alzheimer's disease. Behavioural brain research. 245:120-7. [64] Richard G.M. Morris (2008) Morris water maze. Scholarpedia, 3(8):6315. [65] Spoor M, Nagtegaal A P, Ridwan Y, Borgesius N Z, van Alphen B, van der Pluijm I, Hoeijmakers J H, Frens M A, Borst J G (2012) Accelerated loss of hearing and vision in the DNA-repair deficient Ercc1δ/− mouse. Mechanisms of ageing and development. 133(2-3):59-67. [66]Borgesius N Z, de Waard M C, van der Pluijm I, Omrani A, Zondag G C, van der Horst G T, Melton D W, Hoeijmakers J H, Jaarsma D, Elgersma Y (2011) Accelerated age-related cognitive decline and neurodegeneration, caused by deficient DNA repair. Journal of Neuroscience. 31(35):12543-53. [67] Yurko-Mauro K (2010) Cognitive and cardiovascular benefits of docosahexaenoic acid in aging and cognitive decline. Current Alzheimer Research. 7(3):190-6. [68] Zahr N M, Mayer D, Pfefferbaum A, Sullivan E V (2008) Low striatal glutamate levels underlie cognitive decline in the elderly: evidence from in vivo molecular spectroscopy. Cerebral Cortex. 18(10):2241-50. [69] Rupsingh R, Borrie M, Smith M, Wells J L, Bartha R (2011) Reduced hippocampal glutamate in Alzheimer disease. Neurobiology of aging. 32(5):802-10. [70] Fayed N, Modrego P J, Rojas-Salinas G, Aguilar K (2011) Brain glutamate levels are decreased in Alzheimer's disease: a magnetic resonance spectroscopy study. American Journal of Alzheimer's Disease & Other Dementias. (6):450-6. [71] Matjusaitis M, Chin G, Sarnoski E A, Stolzing A (2016) Biomarkers to identify and isolate senescent cells. Ageing research reviews. 29:1-2. [72] Gorisse L, Pietrement C, Vuiblet V, Schmelzer C E, Köhler M, Duca L, Debelle L, Fornès P, Jaisson S, Gillery P (2016) Protein carbamylation is a hallmark of aging. Proceedings of the National Academy of Sciences. 113(5):1191-6. [73] Syslová K, Böhmova A, Mikoška M, Kuzma M, Pelclová D, Kačer P (2014) Multimarker screening of oxidative stress in aging. Oxidative medicine and cellular longevity. 2014. [74] Stadtman E R, Berlett B S (1998) Reactive oxygen-mediated protein oxidation in aging and disease. Drug metabolism reviews. 30(2):225-43. [75] Nomura Y, Wang B X, Qi S B, Namba T, Kaneko S (1989) Biochemical changes related to aging in the senescence-accelerated mouse. Experimental gerontology. 24(1):49-55. [76] Kitamura Y, Zhao X H, Ohnuki T, Takei M, Nomura Y (1992) Age-related changes in transmitter glutamate and NMDA receptor/channels in the brain of senescence-accelerated mouse. Neuroscience letters. 137(2):169-72. [77] Nomura Y, Kitamura Y, Ohnuki T, Arima T, Yamanaka Y, Sasaki K, Oomura Y (1997) Alterations in acetylcholine, NMDA, benzodiazepine receptors and protein kinase C in the brain of the senescence-accelerated mouse: an animal model useful for studies on cognitive enhancers. Behavioural brain research. 83(1-2):51-5. [78] Oomura Y, Sasaki K, Li A, Yoshh H, Fukata Y, Yago H, Kimura H, Tooyama I, Hanai K, Nomura Y, Yanaihara N (1996) Protection against Impairment of Memory and Immunoreactivity in Senescence-Accelerated Mice by Acidic Fibroblast Growth Factora. Annals of the New York Academy of Sciences. 786(1):337-47. [79] Nomura Y, Okuma Y (1999) Age-related defects in lifespan and learning ability in SAMP8 mice. Neurobiology of aging. 20(2):111-5. [80] Tomobe K, Nomura Y (2009) Neurochemistry, neuropathology, and heredity in SAMP8: a mouse model of senescence. Neurochemical research. 34(4):660-9. [81] Zhao X H, Kitamura Y, Nomura Y (1992) Age-related changes in NMDA-induced [3H] acetylcholine release from brain slices of senescene-accelerated mouse. International journal of developmental neuroscience. 10(2):121-9. [82] Benjamin S A, Finch C E, Guerin J C, Nelson J F, Olshansky S J, Roth G, Smith R G (2011) Handbook of models for human aging. Elsevier. [83] Mills K F, Yoshida S, Stein L R, Grozio A, Kubota S, Sasaki Y, Redpath P, Migaud M E, Apte R S, Uchida K, Yoshino J (2016) Long-term administration of nicotinamide mononucleotide mitigates age-associated physiological decline in mice. Cell metabolism. 24(6):795-806. [84] Rangaraju S, Solis G M, Thompson R C, Gomez-Amaro R L, Kurian L, Encalada S E, Niculescu III A B, Salomon D R, Petrascheck M (2015) Suppression of transcriptional drift extends C. elegans lifespan by postponing the onset of mortality. Elife. 4:e08833. [85] Barger J L, Anderson R M, Newton M A, da Silva C, Vann J A, Pugh T D, Someya S, Prolla T A, Weindruch R (2015) A conserved transcriptional signature of delayed aging and reduced disease vulnerability is partially mediated by SIRT3. PLoS One. 10(4):e0120738. [86] Yaku K, Okabe K, Nakagawa T (2018) NAD metabolism: Implications in aging and longevity. Ageing research reviews. [87] Ivanisevic J, Stauch K L, Petrascheck M, Benton H P, Epstein A A, Fang M, Gorantla S, Tran M, Hoang L, Kurczy M E, Boska M D (2016) Metabolic drift in the aging brain. Aging (Albany NY). 8(5):1000. [88] Huxley A F (1959) Ion movements during nerve activity. Annals of the New York Academy of Sciences. 81(2):221-46. [89] Chapman R A (1967) Dependence on temperature of the conduction velocity of the action potential of the squid giant axon. Nature. 213(5081):1143. [90] Maldonado C A, Wooley B D, Pancrazio J J. The excitatory effect of temperature on the Hodgkin-Huxley model. [91] Fitzhugh R (1966) Theoretical effect of temperature on threshold in the Hodgkin-Huxley nerve model. The Journal of general physiology. 49(5):989-1005. [92] Kuang S, Wang J, Zeng T, Cao A (2008) Thermal impact on spiking properties in Hodgkin-Huxley neuron with synaptic stimulus. Pramana. 70(1):183-90. [93] Goldin M A, Mindlin G B (2017) Temperature manipulation of neuronal dynamics in a forebrain motor control nucleus. PLoS computational biology. 13(8):e1005699. [94] Garedew A, Henderson S O, Moncada S (2010) Activated macrophages utilize glycolytic ATP to maintain mitochondrial membrane potential and prevent apoptotic cell death. Cell Death & Differentiation. 17(10):1540-50. [95] Appelberg K S, Wallet M A, Taylor J P, Cash M N, Sleasman J W, Goodenow M M. HIV-1 Infection Primes Macrophages through STAT Signaling to Promote Enhanced Inflammation and Viral Replication (2017) AIDS Research and Human Retroviruses. [96] Burdo T H, Lentz M R, Autissier P, Krishnan A, Halpern E, Letendre S, Rosenberg E S, Ellis R J, Williams K C (2011) Soluble CD163 made by monocyte/macrophages is a novel marker of HIV activity in early and chronic infection prior to and after anti-retroviral therapy. Journal of Infectious Diseases. 204(1):154-63. [97] Blond D, Raoul H, Le Grand R, Dormont D (2000) Nitric oxide synthesis enhances human immunodeficiency virus replication in primary human macrophages. Journal of virology. 74(19):8904-12. [98] Blond D, Cheret A, Raoul H, Le Grand R, Caufour P, Theodoro F, Dormont D (1998) Nitric oxide synthesis during acute SIVmac251 infection of macaques. Research in virology. 149(2):75-86. [99] Rostasy K, Monti L, Yiannoutsos C, Kneissl M, Bell J, Kemper T L, Hedreen J C, Navia B A (1999) Human immunodeficiency virus infection, inducible nitric oxide synthase expression, and microglial activation: pathogenetic relationship to the acquired immunodeficiency syndrome dementia complex. Annals of neurology. 46(2):207-16. [100] Torre D, Ferrario G (1996) Immunological aspects of nitric oxide in HIV-1 infection. Medical hypotheses. 47(5):405-7. [101] Arafnga M, Edagwa B, Mosley R L, Poluektova L Y, Gorantla S, Gendelman H E. A mature macrophage is a principal HIV-1 cellular reservoir in humanized mice after treatment with long acting antiretroviral therapy (2017) Retrovirology. 14(1):17. [102] Lamers S L, Salemi M, Galligan D C, De Oliveira T, Fogel G B, Granier S C, Zhao L, Brown J N, Morris A, Masliah E, McGrath M S (2009) Extensive HIV-1 intra-host recombination is common in tissues with abnormal histopathology. PloS one. 4(3):e5065. [103] Karimi M, Sahandi Zangabad P, Ghasemi A, Amiri M, Bahrami M, Malekzad H, Ghahramanzadeh Asl H, Mahdieh Z, Bozorgomid M, Ghasemi A, Rahmani Taji Boyuk M R (2016) Temperature-responsive smart nanocarriers for delivery of therapeutic agents: applications and recent advances. ACS applied materials & interfaces. 8(33):21107-33. [104] Ta T, Porter T M (2013) Thermosensitive liposomes for localized delivery and triggered release of chemotherapy. Journal of controlled release. 169(1-2):112-25. [105] Zangabad P S, Mirkiani S, Shahsavari S, Masoudi B, Masroor M, Hamed H, Jafari Z, Taghipour Y D, Hashemi H, Karimi M, Hamblin M R (2017) Stimulus-responsive liposomes as smart nanoplatforms for drug delivery applications. Nanotechnology reviews. [106] Kneidl B, Peller M, Winter G, Lindner L H, Hossann M (2014) Thermosensitive liposomal drug delivery systems: state of the art review. International journal of nanomedicine. 9:4387. [107] Shoemaker R H (2006) The NCI60 human tumour cell line anticancer drug screen. Nature Rev Cancer 6:813-23. [108] NCI-60 Screening Methodology. Details of both the one-dose and five-dose assays. https://dtp.cancer.gov/discovery_development/nci-60/methodology.htm (accessed on 25th June, 2017). [109] Bisaha S N, Malley M F, Pudzianowski A, Monshizadegan H, Wang P, Madsen C S, Gougoutas J Z, Stein P D (2005) A switch in enantiomer preference between mitochondrial F1F0-ATPase chemotypes. Bioorganic & medicinal chemistry letters 15(11):2749-51.
[1686] [110] Lykkeberg A K, Cornett C, Halling-Sørensen B, Hansen S H (2006) Isolation and structural elucidation of tiamulin metabolites formed in liver microsomes of pigs. Journal of pharmaceutical and biomedical analysis. 42(2):223-231. [111] Gillotin F, Chiap P, Frédérich M, Van Heugen J C, Francotte P, Lebrun P, . . . De Tullio P (2010) Coupling of liquid chromatography/tandem mass spectrometry and liquid chromatography/solid-phase extraction/NMR techniques for the structural identification of metabolites following in vitro biotransformation of SUR1-selective ATP-sensitive potassium channel openers. Drug metabolism and disposition. 38(2):232-240. [112] Holbeck S L, Collins J M, Doroshow J H (2010) Analysis of Food and Drug Administration-approved anticancer agents in the NCI60 panel of human tumor cell lines. Molecular cancer therapeutics. 9(5):1451-60. [113] National Cancer Institute (NCI) Developmental Therapeutics Program (DTP) Screening Data Database https://dtp.cancer.gov/dtpstandard/dwindex/index.jsp. Accessed on 29/06/17. [114] Rouslin W I (1987) The mitochondrial adenosine 5′-triphosphatase in slow and fast heart rate hearts. American Journal of Physiology-Heart and Circulatory Physiology. 252(3):H622-7. [115] Tacutu R, Thornton D, Johnson E, Budovsky A, Barardo D, Craig T, Diana E, Lehmann G, Toren D, Wang J, Fraifeld V E, de Magalhaes J P (2018) Human Ageing Genomic Resources: new and updated databases. Nucleic Acids Research 46(D1):D1083-D1090. [116] Wilson D J (2019) The harmonic mean p-value for combining dependent tests. Proceedings of the National Academy of Sciences. 116(4):1195-1200. [117] Rouslin W, Broge C W (1994) Analysis of factors affecting functional assays for estimating IF1, the mitochondrial ATPase Inhibitor. Analytical biochemistry. 222(1):68-75. [118] Rouslin W (1988) Factors affecting the loss of mitochondrial function during zero-flow ischemia (autolysis) in slow and fast heart-rate hearts. Journal of molecular and cellular cardiology. 20(11):999-1007. [119] Rouslin W, Broge C W (1989) Regulation of mitochondrial matrix pH and adenosine 5′-triphosphatase activity during ischemia in slow heart-rate hearts. Role of Pi/H+ symport. Journal of Biological Chemistry. 264(26):15224-9. [120] Rouslin W, Broge C W (1990) Regulation of the mitochondrial adenosine 5′-triphosphatase in situ during ischemia and in vitro in intact and sonicated mitochondria from slow and fast heart-rate hearts. Archives of biochemistry and biophysics. 280(1):103-11. [121] Rouslin W I, Broge C W, Grupp I L (1990) ATP depletion and mitochondrial functional loss during ischemia in slow and fast heart-rate hearts. American Journal of Physiology-Heart and Circulatory Physiology. 259(6):H1759-66. [122] Rouslin W, Broge C W (1992) Why the Mitochondrial ATPase Inhibitor IF1 Fails to Inhibit the Mitochondrial ATPase in Situ in Fast Heart-Rate Mammalian and Avian Heartsa. Annals of the New York Academy of Sciences. 671(1):505-6. [123] Rouslin W, Broge C W (1993) Factors affecting the species-homologous and species-heterologous binding of mitochondrial ATPase inhibitor, IF1, to the mitochondrial ATPase of slow and fast heart-rate hearts. Archives of biochemistry and biophysics. 303(2):443-50. [124] Rouslin W I, Broge C W (1993) Mechanisms of ATP conservation during ischemia in slow and fast heart rate hearts. American Journal of Physiology-Cell Physiology. 264(1):C209-16. [125] Rouslin W, Frank G D, Broge C W (1995) Content and binding characteristics of the mitochondrial ATPase inhibitor, IF1 in the tissues of several slow and fast heart-rate homeothermic species and in two poikilotherms. Journal of bioenergetics and biomembranes. 27(1):117-25. [126] Rouslin W, Broge C W, Guerrieri F, Capozza G (1995) ATPase activity, IF1 content, and proton conductivity of ESMP from control and ischemic slow and fast heart-rate hearts. Journal of bioenergetics and biomembranes. 27(4):459-66. [127] Rouslin W, Broge C W (1996) IF1 function in situ in uncoupler-challenged ischemic rabbit, rat, and pigeon hearts. Journal of Biological Chemistry. 271(39):23638-41. [128] How does metabolic rate scale with size?Cell biology by the numbers. http://book.bionumbers.org/how-does-metabolic-rate-scale-with-size/. [129] Bertholet A M, Chouchani E T, Kazak L, Angelin A, Fedorenko A, Long J Z, . . . Kirichok Y (2019) H+ transport is an integral function of the mitochondrial ADP/ATP carrier. Nature. 571(7766):515-520. [130] Formentini L, Pereira M P, Sánchez-Cenizo L, Santacatterina F, Lucas J J, Navarro C, Martinez-Serrano A, Cuezva J M (2014) In vivo inhibition of the mitochondrial H+-ATP synthase in neurons promotes metabolic preconditioning. The EMBO journal. 33(7):762-78. [131] Mayford M, Bach M E, Huang Y Y, Wang L, Hawkins R D, Kandel E R (1996) Control of memory formation through regulated expression of a CaMKII transgene. Science. 274(5293):1678-83. [132] De Grey A D (1999) The mitochondrial free radical theory of aging. Austin, T X: R G Landes. [133] Sohal R S, Orr W C (2012) The redox stress hypothesis of aging. Free Radical Biology and Medicine. 52(3):539-55. [134] Wang P, Powell S R (2010) Decreased sensitivity associated with an altered formulation of a commercially available kit for detection of protein carbonyls. Free Radical Biology and Medicine. 49(2):119-21. [135] Santacatterina F, Sánchez-Cenizo L, Formentini L, Mobasher M A, Casas E, Rueda C B, Martfnez-Reyes I, de Arenas C N, García-Bermúdez J, Zapata J M, Sánchez-Aragó M (2016) Down-regulation of oxidative phosphorylation in the liver by expression of the ATPase inhibitory factor 1 induces a tumor-promoter metabolic state. Oncotarget. 7(1):490. [136] Formentini L, Santacatterina F, de Arenas C N, Stamatakis K, López-Martinez D, Logan A, Fresno M, Smits R, Murphy M P, Cuezva J M (2017) Mitochondrial ROS production protects the intestine from inflammation through functional M2 macrophage polarization. Cell reports. 19(6):1202-13. [137] Garcia-Bermúdez J, Sánchez-Aragó M, Soldevilla B, del Arco A, Nuevo-Tapioles C, Cuezva J M (2015) PKA phosphorylates the ATPase inhibitory factor 1 and inactivates its capacity to bind and inhibit the mitochondrial H+-ATP synthase. Cell reports. 12(12):2143-55. [138] Schnizer R, Van Heeke G, Amaturo D, Schuster S M (1996) Histidine-49 is necessary for the pH-dependent transition between active and inactive states of the bovine F1-ATPase inhibitor protein. Biochimica et Biophysica Acta (BBA)-Protein Structure and Molecular Enzymology. 1292(2):241-8. [139] Ando C, Ichikawa N (2008) Glutamic acid in the inhibitory site of mitochondrial ATPase inhibitor, IF1, participates in pH sensing in both mammals and yeast. Journal of biochemistry. 144(4):547-53. [140] Ichikawa N, Ushida S, Kawabata M, Masazumi Y (1999) Nucleotide sequence of cDNA coding the mitochondrial precursor protein of the ATPase inhibitor from humans. Bioscience, biotechnology, and biochemistry. 63(12):2225-7. [141] Green D W, Grover G J (2000) The IF1 inhibitor protein of the mitochondrial F1F0-ATPase. Biochimica et Biophysica Acta (BBA)-Bioenergetics. 1458(2-3):343-55. [142] van Raaij M J, Orriss G L, Montgomery M G, Runswick M J, Fearnley I M, Skehel J M, Walker J E (1996) The ATPase inhibitor protein from bovine heart mitochondria: the minimal inhibitory sequence. Biochemistry. 35(49):15618-25. [143] Gledhill J R, Montgomery M G, Leslie A G, Walker J E (2007) How the regulatory protein, IF1, inhibits F1-ATPase from bovine mitochondria. Proceedings of the National Academy of Sciences. 104(40):15671-6. [144] Papa S, Zanotti F, Cocco T, Perrucci C, Candita C, Minuto M (1996) Identification of functional domains and critical residues in the adenosinetriphosphatase inhibitor protein of mitochondrial F0F1 ATP synthase. European journal of biochemistry. 240(2):461-7. [145] Zanotti F, Raho G, Vuolo R, Gaballo A, Papa F, Papa S (2000) Functional domains of the ATPase inhibitor protein from bovine heart mitochondria. FEBS letters. 482(1-2):163-6. [146] Zanotti F, Raho G, Gaballo A, Papa S (2004) Inhibitory and anchoring domains in the ATPase inhibitor protein IF1 of bovine heart mitochondrial ATP synthase. Journal of bioenergetics and biomembranes. 36(5):447-57. [147] de Chiara C, Nicastro G, Spisni A, Zanotti F, Cocco T, Papa S (2002) Activity and NMR structure of synthetic peptides of the bovine ATPase inhibitor protein, IF1. Peptides. 23(12):2127-41. [148] Stout J S, Partridge B E, Dibbern D A, Schuster S M (1993) Peptide analogs of the beef heart mitochondrial F1-ATPase inhibitor protein. Biochemistry. 32(29):7496-502. [149] Prugh J D, Birchenough L A, Egbertson M S (1992) A simple method of protecting a secondary amine with tert butyloxycarbonyl (BOC) in the presence of a primary amine. Synthetic communications. 22(16):2357-60. [150] Laduron F, Tamborowski V, Moens L, Horvith A, De Smaele D, Leurs S (2005) Efficient and scalable method for the selective alkylation and acylation of secondary amines in the presence of primary amines. Organic process research & development. 9(1):102-4. [151] Gordon B H (1995) The pharmacokinetics and metabolism of almitrine bismesylate. Doctoral dissertation, College of Medicine, Biological Sciences and Psychology, University of Leicester. [152] Travis, William D; Brambilla, Elizabeth; Muller-Hermelink, H Konrad; et al., eds. (2004). Pathology and Genetics of Tumours of the Lung, Pleura, Thymus and Heart. World Health Organization Classification of Tumours. Lyon: IARC Press. ISBN 92 832 2418 3. [153] Cotten J F (2014) The latest pharmacologic ventilator. Anesthesiology: The Journal of the American Society of Anesthesiologists. 121(3):442-4. [154] Golder F J, Hewitt M M, McLeod J F (2013) Respiratory stimulant drugs in the post-operative setting. Respiratory physiology & neurobiology. 189(2):395-402. [155] Yang X, Yu Y, Xu J, Shu H, Liu H, Wu Y, . . . & Wang Y (2020) Clinical course and outcomes of critically ill patients with SARS-CoV-2 pneumonia in Wuhan, China: a single-centered, retrospective, observational study. The Lancet Respiratory Medicine. [156] South East London Joint Medicines Formulary, NHS, http://www.selondonjointmedicinesformulary.nhs.uk/chaptersSubDetails.asp?FormularySectionID=3&Su bSectionRef=03.05.01&SubSectionID=A100&drugmatch=4923 #4923 (accessed on 22/07/18). [157] https://www.has-sante.fr/portail/upload/docs/application/pdf/2013-08/vectarion_ct_12442.pdf (accessed on 18/11/18). [158] Esnault P, Hraiech S, Bordes J, Forel J M, Adda M, Rambaud R, et al. (2019) Evaluation of Almitrine Infusion During Veno-Venous Extracorporeal Membrane Oxygenation for Severe Acute Respiratory Distress Syndrome in Adults. Anesthesia & Analgesia, 129(2), e48-e51. [159] European Medicines Agency (23 May 2013) Assessment report for almitrine-containing medicinal products for oral use. http://www.ema.europa.eu/docs/en_G B/document_library/Referrals_document/Almitrine/Recommendati on_provided_by_Pharmacovigilance_Risk_Assessment_Committee/WC500144134.pdf (accessed on 12/07/17). [160] Michard F, Wolff M A, Herman B, Wysocki M (2001) Right ventricular response to high-dose almitrine infusion in patients with severe hypoxemia related to acute respiratory distress syndrome. Critical care medicine. 29(1), 32-36. [161] Howard P (1989) Hypoxia, almitrine, and peripheral neuropathy. Thorax. 44(4):247. [162] Stavchansky S, Doluisio J T, MacLeod C M, Szalkowski M B, Bachand Jr R T, Heilman R, Sebree T B, Geary R S (1989) One year administration of almitrine bismesylate (Vectarion) to chronic obstructive pulmonary disease patients: pharmacokinetic analysis. Biopharmaceutics & drug disposition. 10(3):247-55. [163] MacLeod C N, Thomas R W, Bartley E A, Parkhurst G W, Bachand R T (1983) Effects and handling of almitrine bismesylate in healthy subjects. European journal of respiratory diseases. Supplement. 126:275-89. [164] Winkelmann B R, Kullmer T H, Kneissl D G, Trenk D, Kronenberger H (1994) Low-dose almitrine bismesylate in the treatment of hypoxemia due to chronic obstructive pulmonary disease. Chest. 105(5):1383-91. [165] Weitzenblum E, Schrijen F, Apprill M, Prefaut C, Yernault J C (1991) One year treatment with almitrine improves hypoxaemia but does not increase pulmonary artery pressure in COPD patients. European Respiratory Journal. 4(10):1215-22. [166] Bell R C, Mullins R C, West L G, Bachand R T, Johanson W G (1986) The effect of almitrine bismesylate on hypoxemia in chronic obstructive pulmonary disease. Annals of internal medicine. 105(3):342-6. [167] Bromet N, Singlas E (1984) Clinical pharmacokinetics of almitrine dimesylate. Presse medicale (Paris, France: 1983). (34):2071-7. [168] Górecka D, Sliwinski P, Palasiewicz G, Pachocki R, Zielinski J (2003) Effects of almitrine bismesylate on arterial blood gases in patients with chronic obstructive pulmonary disease and moderate hypoxaemia: a multicentre, randomised, double-blind, placebo-controlled study. Respiration. 70(3):275-83. [169] Barker H E, Paget J T, Khan A A, Harrington K J (2015) The tumour microenvironment after radiotherapy: mechanisms of resistance and recurrence. Nature reviews Cancer. 15(7):409. [170] Zhou Y, Hileman E O, Plunkett W, Keating M J, Huang P (2003) Free radical stress in chronic lymphocytic leukemia cells and its role in cellular sensitivity to ROS-generating anticancer agents. Blood. 101(10):4098-104. [171] Wondrak G T (2009) Redox-directed cancer therapeutics: molecular mechanisms and opportunities. Antioxidants & redox signaling. 11(12):3013-69. [172] Berndtsson M, Hägg M, Panaretakis T, Havelka A M, Shoshan M C, Linder S (2007) Acute apoptosis by cisplatin requires induction of reactive oxygen species but is not associated with damage to nuclear DNA. International journal of cancer. 120(1):175-80. [173] Sullivan R, Pare G C, Frederiksen L J, Semenza G L, Graham C H (2008) Hypoxia-induced resistance to anticancer drugs is associated with decreased senescence and requires hypoxia-inducible factor-1 activity. Molecular cancer therapeutics. 7(7):1961-73. [174] Doktorova H, Hrabeta J, Khalil M A, Eckschlager T (2015) Hypoxia-induced chemoresistance in cancer cells: The role of not only HIF-1. Biomedical Papers of the Medical Faculty of Palacky University in Olomouc. 159(2). [175] Saadjian A Y, Philip-Joel F F, Barret A, Levy S, Arnaud A G (1994) Effect of almitrine bismesylate on pulmonary vasoreactivity to hypoxia in chronic obstructive pulmonary disease. European Respiratory Journal. 7(5):862-8. [176] Prost J F, Desche P, Jardin F, Margairaz A (1991) Comparison of the effects of intravenous almitrine and positive end-expiratory pressure on pulmonary gas exchange in adult respiratory distress syndrome. European Respiratory Journal. 4(6):683-7. [177] Gallart L, Lu Q I, Puybasset L, Umamaheswara Rao G S, Coriat P, Rouby J J, NO Almitrine Study Group (1998) Intravenous almitrine combined with inhaled nitric oxide for acute respiratory distress syndrome. American journal of respiratory and critical care medicine. 158(6):1770-7. [178] Jolliet P, Bulpa P, Ritz M, Ricou B, Lopez J, Chevrolet J C (1997) Additive beneficial effects of the prone position, nitric oxide, and almitrine bismesylate on gas exchange and oxygen transport in acute respiratory distress syndrome. Critical care medicine. 25(5):786-94. [179] Silva-Costa-Gomes T, Gallart L, Valles J, Trillo L, Minguella J, Puig M M (2005) Low-vs high-dose almitrine combined with nitric oxide to prevent hypoxia during open-chest one-lung ventilation. British journal of anaesthesia. 95(3):410-6. [180] Parotte P, Boileau S, Marchand G, Laxenaire M C (1980) Effects of a respiratory analeptic with peripheral action-almitrine on ventilation immediately after surgery. In Annales de l'anesthesiologie francaise. 21 (5): 519-524. [181] Laxenaire M C, Borgo J, Comet C, Torrens J M (1980) Almitrine in the treatment of post-anaesthetic hypoventilation. Review Frangais Maladies Respiratoires. 8:225-33. [182] Stavchansky S, Doluisio J T, MacLeod C M, Sebree T B, Heilman R, Bachand Jr R T, Szalkowski M B, Geary R S (1989) Relative bioavailability of almitrine bismesylate in humans. Biopharmaceutics & drug disposition. 10(3):239-46. [183] Payen D, Muret J, Beloucif S, Gatecel C, Kermarrec N, Guinard N, Mateo J (1998) Inhaled nitric oxide, almitrine infusion, or their coadministration as a treatment of severe hypoxemic focal lung lesions. Anesthesiology: The Journal of the American Society of Anesthesiologists. 89(5):1157-65. [184] Amundson S A, Do K T, Vinikoor L C, Lee R A, Koch-Paiz C A, Ahn J, Reimers M, Chen Y, Scudiero D A, Weinstein J N, Trent J M (2008) Integrating global gene expression and radiation survival parameters across the 60 cell lines of the National Cancer Institute Anticancer Drug Screen. Cancer research. 68(2):415-24. [185] Polavarapu S, Mani A M, Gundala N K, Hari A D, Bathina S, Das U N (2014) Effect of polyunsaturated fatty acids and their metabolites on bleomycin-induced cytotoxic action on human neuroblastoma cells in vitro. PloS one. 9(12):e114766. [186] Dilly S J, Clark A J, Marsh A, Mitchell D A, Cain R, Fishwick C W, Taylor P C (2017) A chemical genomics approach to drug reprofiling in oncology: Antipsychotic drug risperidone as a potential adenocarcinoma treatment. Cancer letters. 393:16-21. [187] Yu C, Li Y, Holmes A, Szafranski K, Faulkes C G, Coen C W, Buffenstein R, Platzer M, De Magalhães J P, Church G M (2011) RNA sequencing reveals differential expression of mitochondrial and oxidation reduction genes in the long-lived naked mole-rat when compared to mice. PloS one. 6(11):e26729. [188] Lebowitz M S, Pedersen P L (1996) Protein inhibitor of mitochondrial ATP synthase: relationship of inhibitor structure to pH-dependent regulation. Archives of Biochemistry and Biophysics. 330(2):342-354. [189] Gordon-Smith D J, Carbajo R J, Yang J C, Videler H, Runswick M J, Walker J E, Neuhaus D (2001). Solution structure of a C-terminal coiled-coil domain from bovine IF1: The inhibitor protein of F1 ATPase. Journal of molecular biology, 308(2), 325-339. [190] Cabezon E, Butler P J G, Runswick M J, Walker J E (2000) Modulation of the oligomerization state of the bovine F1-ATPase inhibitor protein, IF1, by pH. Journal of Biological Chemistry. 275(33):25460-25464. [191] Bason J V, Runswick M J, Fearnley I M, Walker J E (2011) Binding of the inhibitor protein IF₁ to bovine F₁-ATPase. Journal of molecular biology. 406(3):443-453. [192] Rothbard J B, Garlington S, Lin Q, Kirschberg T, Kreider E, McGrane P L, . . . & Khavari P A (2000) Conjugation of arginine oligomers to cyclosporin A facilitates topical delivery and inhibition of inflammation. Nature medicine. 6(11):1253-1257. [193] Mix K A, Lomax J E, Raines R T (2017) Cytosolic delivery of proteins by bioreversible esterification. Journal of the American Chemical Society. 139(41):14396-14398. [194] Ressler V T, Mix K A, Raines R T (2019) Esterification delivers a functional enzyme into a human cell. ACS chemical biology. 14(4):599-602. [195] Zorzi A, Middendorp S J, Wilbs J, Deyle K, Heinis C (2017) Acylated heptapeptide binds albumin with high affinity and application as tag furnishes long-acting peptides. Nature communications. 8(1):1-9. [196] Ekrami H M, Kennedy A R, Shen W C (1995) Water-soluble fatty acid derivatives as acylating agents for reversible lipidization of polypeptides. FEBS letters. 371(3):283-286. [197] Gautam A, Singh H, Tyagi A, Chaudhary K, Kumar R, Kapoor P, Raghava G P (2012) CPPsite: a curated database of cell penetrating peptides. Database. 2012. [198] Váquez J, Sun C, Du J, Fuentes L, Sumners C, Raizada M K (2003) Transduction of a functional domain of the AT1 receptor in neurons by HIV-Tat PTD. Hypertension. 41(3):751-756. [199] Tünnemann G, Martin R M, Haupt S, Patsch C, Edenhofer F, Cardoso M C (2006) Cargo-dependent mode of uptake and bioavailability of TAT-containing proteins and peptides in living cells. The FASEB journal. 20(11):1775-1784. [200] Vivés E, Schmidt J, Pélegrin A (2008) Cell-penetrating and cell-targeting peptides in drug delivery. Biochimica et Biophysica Acta (BBA)-Reviews on Cancer. 1786(2):126-138. [201] Begley R, Liron T, Baryza J, Mochly-Rosen D (2004) Biodistribution of intracellularly acting peptides conjugated reversibly to Tat. Biochemical and biophysical research communications. 318(4): 949-954. [202] Miyaji Y, Walter S, Chen L, Kurihara A, Ishizuka T, Saito M, . . . Okazaki O (2011) Distribution of KAI-9803, a novel δ-protein kinase C inhibitor, after intravenous administration to rats. Drug metabolism and disposition. 39(10):1946-1953. [203] Borsello T, Clarke P G, Hirt L, Vercelli A, Repici M, Schorderet D F, . . . Bonny C (2003) A peptide inhibitor of c-Jun N-terminal kinase protects against excitotoxicity and cerebral ischemia. Nature medicine. 9(9):1180-1186. [204] Flynn C R, Cheung-Flynn J, Smoke C C, Lowry D, Roberson R, Sheller M R, Brophy C M (2010) Internalization and intracellular trafficking of a PTD-conjugated anti-fibrotic peptide, AZX100, in human dermal keloid fibroblasts. Journal of pharmaceutical sciences. 99(7):3100-3121. [205] Chen L, Wright L R, Chen C H, Oliver S F, Wender P A, Mochly-Rosen D (2001) Molecular transporters for peptides: delivery of a cardioprotective EPKC agonist peptide into cells and intact ischemic heart using a transport system, R7. Chemistry & biology. 8(12):1123-1129. [206] Mitchell D J, Steinman L, Kim D T, Fathman C G, Rothbard J B (2000) Polyarginine enters cells more efficiently than other polycationic homopolymers. The Journal of Peptide Research. 56(5):318-325. [207] Brewer S J, Sassenfeld H M (1985) The purification of recombinant proteins using C-terminal polyarginine fusions. Trends in Biotechnology. 3(5):119-122. [208] Holm T, Räägel H, Andaloussi S E, Hein M, Mäe M, Pooga M, Langel Ü (2011) Retro-inversion of certain cell-penetrating peptides causes severe cellular toxicity. Biochimica et Biophysica Acta (BBA)-Biomembranes. 1808(6):1544-1551. [209] Brugidou J, Legrand C, Mery J, Rabie A (1995) The retro-inverso form of a homeobox-derived short peptide is rapidly internalized by cultured neurons: a new basis for an efficient intracellular delivery system. Biochemical and biophysical research communications. 214(2):685-693. [210] Nasrollahi S A, Taghibiglou C, Azizi E, Farboud E S (2012) Cell-penetrating peptides as a novel transdermal drug delivery system. Chemical biology & drug design. 80(5):639-646. [211] Jiang T, Olson E S, Nguyen Q T, Roy M, Jennings P A, Tsien R Y (2004) Tumor imaging by means of proteolytic activation of cell-penetrating peptides. Proceedings of the National Academy of Sciences. 101(51):17867-17872. [212] Savariar E N, Felsen C N, Nashi N, Jiang T, Ellies L G, Steinbach P, . . . Nguyen Q T (2013) Real-time in vivo molecular detection of primary tumors and metastases with ratiometric activatable cell-penetrating peptides. Cancer research. 73(2):855-864. [213] Unkart J T, Chen S L, Wapnir I L, GonzAlez J E, Harootunian A, Wallace A M (2017) Intraoperative tumor detection using a ratiometric activatable fluorescent peptide: a first-in-human phase 1 study. Annals of surgical oncology. 24(11):3167-3173. [214] Futaki S, Ohashi W, Suzuki T, Niwa M, Tanaka S, Ueda K, . . . & Sugiura Y (2001) Stearylated arginine-rich peptides: a new class of transfection systems. Bioconjugate chemistry. 12(6):1005-1011. [215] Katayama S, Hirose H, Takayama K, Nakase I, Futaki S (2011) Acylation of octaarginine: Implication to the use of intracellular delivery vectors. Journal of controlled release. 149(1):29-35. [216] Taylor B N, Mehta R R, Yamada T, Lekmine F, Christov K, Chakrabarty A M, . . . Gupta T K D. (2009) Noncationic peptides obtained from azurin preferentially enter cancer cells. Cancer research. 69(2):537-546. [217] Kang Y C, Son M, Kang S, Im S, Piao Y, Lim K S, . . . Pak Y K (2018) Cell-penetrating artificial mitochondria-targeting peptide-conjugated metallothionein 1A alleviates mitochondrial damage in Parkinson's disease models. Experimental & molecular medicine. 50(8):1-13. [218] Horton K L, Stewart K M, Fonseca S B, Guo Q, Kelley S O (2008) Mitochondria-penetrating peptides. Chemistry & biology. 15(4):375-82. [219] Jean S R, Ahmed M, Lei E K, Wisnovsky S P, Kelley S O (2016) Peptide-mediated delivery of chemical probes and therapeutics to mitochondria. Accounts of chemical research. 49(9):1893-902. [220] Qian Z, Liu T, Liu Y Y, Briesewitz R, Barrios A M, Jhiang S M, Pei D (2012) Efficient delivery of cyclic peptides into mammalian cells with short sequence motifs. ACS chemical biology. 8(2):423-31. [221] Qian Z, Martyna A, Hard R L, Wang J, Appiah-Kubi G, Coss C, Phelps M A, Rossman J S, Pei D (2016) Discovery and mechanism of highly efficient cyclic cell-penetrating peptides. Biochemistry. 55(18):2601-12. [222] Appiah Kubi G, Qian Z, Amiar S, Sahni A, Stahelin R V, Pei D (2018) Non-Peptidic Cell-Penetrating Motifs for Mitochondrion-Specific Cargo Delivery. Angewandte Chemie. 130(52):17429-34. [223] Zielonka J, Joseph J, Sikora A, Hardy M, Ouari O, Vasquez-Vivar J, Cheng G, Lopez M, Kalyanaraman B (2017) Mitochondria-targeted triphenylphosphonium-based compounds: syntheses, mechanisms of action, and therapeutic and diagnostic applications. Chemical reviews. 117(15):10043-120. [224] Pathak R K, Marrache S, Ham D A, Dhar S (2014) Mito-DCA: a mitochondria targeted molecular scaffold for efficacious delivery of metabolic modulator dichloroacetate. ACS chemical biology. 9(5):1178-87. [225] Appiah Kubi G, Qian Z, Amiar S, Sahni A, Stahelin R V, Pei D (2018) Non-Peptidic Cell-Penetrating Motifs for Mitochondrion-Specific Cargo Delivery. Angewandte Chemie. 130(52):17429-17434. [226] Heinis C, Rutherford T, Freund S, Winter G (2009) Phage-encoded combinatorial chemical libraries based on bicyclic peptides. Nature chemical biology. 5(7):502. [227] Baeriswyl V, Rapley H, Pollaro L, Stace C, Teufel D, Walker E, Chen S, Winter G, Tite J, Heinis C (2012) Bicyclic peptides with optimized ring size inhibit human plasma kallikrein and its orthologues while sparing paralogous proteases. Chem Med Chem. 7(7):1173-6. [228] Angelini A, Cendron L, Chen S, Touati J, Winter G, Zanotti G, Heinis C (2012) Bicyclic peptide inhibitor reveals large contact interface with a protease target. ACS chemical biology. 7(5):817-21. [229] Teufel D P, Bennett G, Harrison H, Van Rietschoten K, Pavan S, Stace C, Le Floch F, Van Bergen T, Vermassen E, Barbeaux P, Hu T T (2018) Stable and long-lasting, novel bicyclic peptide plasma kallikrein inhibitors for the treatment of diabetic macular edema. Journal of medicinal chemistry. 61(7):2823-36. [230] Eder M, Pavan S, Bauder-Wüst U, van Rietschoten K, Baranski A C, Harrison H, Campbell S, Stace C L, Walker E H, Chen L, Bennett G (2019) Bicyclic peptides as a new modality for imaging and targeting of proteins overexpressed by tumors. Cancer research. 79(4):841-52. 1231 ] Rhodes C A, Pei D (2017) Bicyclic Peptides as Next-Generation Therapeutics. Chemistry-A European Journal. 23(52):12690-703. [232] Lian W, Jiang B, Qian Z, Pei D (2014) Cell-permeable bicyclic peptide inhibitors against intracellular proteins. Journal of the American Chemical Society. 136(28):9830-3. [233] Qian Z, Rhodes C A, McCroskey L C, Wen J, Appiah-Kubi G, Wang D J, Guttridge D C, Pei D (2017) Enhancing the cell permeability and metabolic stability of peptidyl drugs by reversible bicyclization. Angewandte Chemie International Edition. 56(6):1525-9. [234] Satre M, De Jerphanion M B, Huet J, Vignais P V (1975) ATPase inhibitor from yeast mitochondria. Purification and properties. Biochimica et Biophysica Acta (BBA)-Bioenergetics. 387(2):241-55. [235] Yampolsky L Y, Stoltzfus A (2005) The exchangeability of amino acids in proteins. Genetics. 170(4):1459-1472. [236] Wender P A, Mitchell D J, Pattabiraman K, Pelkey E T, Steinman L, Rothbard J B (2000) The design, synthesis, and evaluation of molecules that enable or enhance cellular uptake: peptoid molecular transporters. Proceedings of the National Academy of Sciences. 97(24):13003-13008. [237] Naso M F, Tomkowicz B, Perry W L, Strohl W R (2017) Adeno-associated virus (AAV) as a vector for gene therapy. BioDrugs. 31(4):317-34. [238] Whittemore K, Derevyanko A, Martinez P, Serrano R, Pumarola M, Bosch F, Blasco M A (2019) Telomerase gene therapy ameliorates the effects of neurodegeneration associated to short telomeres in mice. Aging (Albany NY). 11(10):3280. [239] Lee Y W, Luther D C, Kretzmann J A, Burden A, Jeon T, Zhai S, Rotello V M (2019) Protein delivery into the cell cytosol using non-viral nanocarriers. Theranostics. 9 (11):3280-3292. [240] Chatin B, Mével M, Devalliëre J, Dallet L, Haudebourg T, Peuziat P, Colombani T, Berchel M, Lambert O, Edelman A, Pitard B (2015) Liposome-based formulation for intracellular delivery of functional proteins. Mol. Ther.-Nucleic Acids 4, No. e244. [241] Shi B, Keough E, Matter A, Leander K, Young S, Carlini E, Sachs A B, Tao W, Abrams M, Howell B, Sepp-Lorenzino L (2011) Biodistribution of small interfering RNA at the organ and cellular levels after lipid nanoparticle-mediated delivery. J. Histochem. Cytochem. 59(8):727-740. [242] Tillack K, Aboutalebi H, Kramer E R (2015) An efficient and versatile system for visualization and genetic modification of dopaminergic neurons in transgenic mice. PloS one. 10(8):e0136203. [243] Pickrell A M, Pinto M, Hida A, Moraes C T (2011) Striatal dysfunctions associated with mitochondrial DNA damage in dopaminergic neurons in a mouse model of Parkinson's disease. Journal of Neuroscience. 31(48):17649-58. [244] Chen L, Xie Z, Turkson S, Zhuang X (2015) A53T human α-synuclein overexpression in transgenic mice induces pervasive mitochondria macroautophagy defects preceding dopamine neuron degeneration. Journal of Neuroscience. 35(3):890-905. [245] Schönig K, Freundlieb S, Gossen M (2013) Tet-Transgenic Rodents: a comprehensive, up-to date database. Transgenic research. 22(2):251-4. [246] Premsrirut P K, Dow L E, Kim S Y, Camiolo M, Malone C D, Miething C, Scuoppo C, Zuber J, Dickins R A, Kogan S C, Shroyer K R (2011) A rapid and scalable system for studying gene function in mice using conditional RNA interference. Cell. 145(1):145-58. [247] Zinn E, Pacouret S, Khaychuk V, Turunen H T, Carvalho L S, Andres-Mateos E, Shah S, Shelke R, Maurer A C, Plovie E, Xiao R (2015) In silico reconstruction of the viral evolutionary lineage yields a potent gene therapy vector. Cell reports. 12(6):1056-68. [248] Ginn S L, Amaya A K, Alexander I E, Edelstein M, Abedi M R (2018) Gene therapy clinical trials worldwide to 2017: An update. The journal of gene medicine. 20(5):e3015. [249] Coune P G, Schneider B L, Aebischer P (2012) Parkinson's disease: gene therapies. Cold Spring Harbor perspectives in medicine. a009431. [250] Feng L R, Maguire-Zeiss K A (2010) Gene Therapy in Parkinson's Disease. CNS drugs. 24(3):177-92. [251] Forsayeth J, Bankiewicz K S, Aminoff M J (2010) Gene therapy for Parkinson's disease: where are we now and where are we going?Expert review of neurotherapeutics. 10(12):1839-45. [252] Axelsen T M, Woldbye D P (2018) Gene therapy for Parkinson's disease, an update. Journal of Parkinson's disease. 1-21. [253] Palfi S, Gurruchaga J M, Ralph G S, Lepetit H, Lavisse S, Buttery P C, Watts C, Miskin J, Kelleher M, Deeley S, Iwamuro H (2014) Long-term safety and tolerability of ProSavin, a lentiviral vector-based gene therapy for Parkinson's disease: a dose escalation, open-label, phase 1/2 trial. The Lancet. 383(9923):1138-46. [254] LeWitt P A, Rezai A R, Leehey M A, Ojemann S G, Flaherty A W, Eskandar E N, Kostyk S K, Thomas K, Sarkar A, Siddiqui M S, Tatter S B (2011) AAV2-GAD gene therapy for advanced Parkinson's disease: a double-blind, sham-surgery controlled, randomised trial. The Lancet Neurology. 10(4):309-19. [255] Schriner S E, Linford N J, Martin G M, Treuting P, Ogburn C E, Emond M, Coskun P E, Ladiges W, Wolf N, Van Remmen H, Wallace D C (2005) Extension of murine life span by overexpression of catalase targeted to mitochondria. Science. 308(5730):1909-11. [256] Mitsui A, Hamuro J, Nakamura H, Kondo N, Hirabayashi Y, Ishizaki-Koizumi S, Hirakawa T, Inoue T, Yodoi J. Overexpression of human thioredoxin in transgenic mice controls oxidative stress and life span. Antioxidants and Redox Signaling. 2002 Aug. 1; 4(4):693-6. [257] Owen S C, Doak A K, Wassam P, Shoichet M S, Shoichet B K (2012) Colloidal aggregation affects the efficacy of anticancer drugs in cell culture. ACS chemical biology. 7(8):1429-35. [258] Owen S C, Doak A K, Ganesh A N, Nedyalkova L, McLaughlin C K, Shoichet B K, Shoichet M S (2014) Colloidal drug formulations can explain “bell-shaped” concentration-response curves. ACS chemical biology. 9(3):777-84.

The application's sequence listing, which the Patent Office published only in electronic form, follows.

SEQUENCE LISTING (1684 sequences)

SEQ ID NO: 1 - protein, 220 aa, Artificial Sequence
  Encompasses natural & artificial PRT sequences; artificial sequences designed by aligning (by their "pH dependence motif") some natural IF1 protein sequences sourced from InterPro family IPR007648; more detail elsewhere in present application
  MISC_FEATURE (1)..(1): Xaa at this position is a single (one, 1) amino acid selected from the following options: Gly Pro Ala Val Leu Ile Met Cys Tyr His Lys Arg Gln Asn Glu Asp Ser Thr
  MISC_FEATURE (2)..(2): Xaa at this position is a single (one, 1) amino acid selected from the following options: Gly Pro Ala Val Cys Phe His Lys Arg Gln Asn Glu Asp Ser Thr
  MISC_FEATURE (3)..(3): Xaa at this position is a single (one, 1) amino acid selected from the following options: Gly Pro Ala Val Leu Ile Met Phe Tyr Trp Lys Arg Gln Asn Glu Asp Ser Thr
  MISC_FEATURE (4)..(4): Xaa at this position is a single (one, 1) amino acid selected from the following options: Gly Ala Val Leu Ile Met Phe His Lys Arg Gln Asn Glu Asp Ser Thr
  MISC_FEATURE (5)..(5): Xaa at this position is a single (one, 1) amino acid selected from the following options: Gly Pro Ala Val Leu Ile Met Cys Phe His Lys Arg Gln Glu Asp Ser Thr
  MISC_FEATURE (6)..(6): Xaa at this position is a single (one, 1) amino acid selected from the following options: Gly Pro Val Leu Ile Phe His Lys Arg Gln Glu Asp Ser Thr
  MISC_FEATURE (7)..(7): Xaa at this position is a single (one, 1) amino acid selected from the following options: Gly Pro Ala Leu Ile Met Cys Phe His Lys Arg Gln Asn Glu Ser Thr
  MISC_FEATURE (8)..(8): Xaa at this position is a single (one, 1) amino acid selected from the following options: Gly Pro Ala Val Leu Ile Met Lys Arg Gln Asn Glu Asp Ser Thr
  MISC_FEATURE (9)..(9): Xaa at this position is a single (one, 1) amino acid selected from the following options: Ala Val Leu Ile Phe Trp His Lys Arg Gln Asn Glu Asp Ser
  MISC_FEATURE (10)..(10): Xaa at this position is a single (one, 1) amino acid selected from the following options: Gly Pro Ala Leu Ile Phe Tyr Trp Lys Gln Asn Glu Asp Ser Thr
  MISC_FEATURE (11)..(11): Xaa at this position is a single (one, 1) amino acid selected from the following options: Gly Pro Ala Val Leu Met His Lys Arg Gln Asn Glu Asp Ser
  MISC_FEATURE (12)..(12): Xaa at this position is a single (one, 1) amino acid selected from the following options: Gly Pro Val Leu Ile Met Phe Tyr Trp His Lys Arg Gln Asn Glu Asp Ser Thr
  MISC_FEATURE (13)..(13): Xaa at this position is a single (one, 1) amino acid selected from the following options: Gly Pro Ala Val Leu Ile Tyr Trp His Lys Arg Gln Asn Glu Ser Thr
  MISC_FEATURE (14)..(14): Xaa at this position is a single (one, 1) amino acid selected from the following options: Gly Pro Ala Val Leu Ile Met Cys Tyr His Lys Arg Gln Asn Glu Asp Ser
  MISC_FEATURE (15)..(15): Xaa at this position is a single (one, 1) amino acid selected from the following options: Gly Pro Ala Leu Ile Cys Phe Lys Arg Gln Asn Glu Asp Ser Thr
  MISC_FEATURE (16)..(16): Xaa at this position is a single (one, 1) amino acid selected from the following options: Gly Pro Ala Val Leu Ile Met Phe Tyr Arg Gln Asn Glu Ser Thr
  MISC_FEATURE (17)..(17): Xaa at this position is a single (one, 1) amino acid selected from the following options: Gly Pro Ala Leu Ile Met Phe Tyr Trp Lys Arg Asn Glu Asp Ser Thr
  MISC_FEATURE (18)..(18): Xaa at this position is a single (one, 1) amino acid selected from the following options: Gly Pro Ala Val Leu Ile Cys Phe Tyr His Lys Arg Gln Asn Glu Asp Ser Thr
  MISC_FEATURE (19)..(19): Xaa at this position is a single (one, 1) amino acid selected from the following options: Gly Pro Ala Val Leu Ile Cys Tyr His Lys Arg Gln Asn Glu Asp Thr
  MISC_FEATURE (20)..(20): Xaa at this position is a single (one, 1) amino acid selected from the following options: Gly Pro Ala Val Leu Ile Met Cys Tyr His Lys Arg Asn Glu Asp Ser Thr
  MISC_FEATURE (21)..(21): Xaa at this position is a single (one, 1) amino acid selected from the following options: Gly Pro Ala Leu Phe Tyr Arg Gln Asn Glu Asp Ser Thr
  MISC_FEATURE (22)..(22): Xaa at this position is a single (one, 1) amino acid selected from the following options: Gly Pro Ala Val Leu Met Cys Phe Tyr Lys Arg Gln Asn Glu Asp Ser Thr
  MISC_FEATURE (23)..(23): Xaa at this position is a single (one, 1) amino acid selected from the following options: Gly Pro Ala Val Leu Ile Met Cys Gln Asn Glu Asp Ser
  MISC_FEATURE (24)..(24): Xaa at this position is a single (one, 1) amino acid selected from the following options: Gly Pro Ala Val Leu Phe His Lys Arg Glu Asp Ser Thr
  MISC_FEATURE (25)..(25): Xaa at this position is a single (one, 1) amino acid selected from the following options: Pro Ala Val Leu Ile Met Phe Tyr Lys Gln Asn Glu Asp Ser Thr
  MISC_FEATURE (26)..(26): Xaa at this position is a single (one, 1) amino acid selected from the following options: Gly Pro Ala Val Leu Ile Met Lys Arg Gln Asn Glu Asp Ser Thr
  MISC_FEATURE (27)..(27): Xaa at this position is a single (one, 1) amino acid selected from the following options: Gly Pro Ala Val Leu Ile Cys His Arg Gln Glu Asp Ser Thr
  MISC_FEATURE (28)..(28): Xaa at this position is a single (one, 1) amino acid selected from the following options: Gly Pro Ala Val Leu Ile Met Cys Phe Lys Arg Gln Asn Glu Asp Ser Thr
  MISC_FEATURE (29)..(29): Xaa at this position is a single (one, 1) amino acid selected from the following options: Gly Pro Ala Val Leu Ile Cys Phe His Lys Arg Gln Asn Glu Asp Ser Thr
  MISC_FEATURE (30)..(30): Xaa at this position is a single (one, 1) amino acid selected from the following options: Gly Pro Ala Val Leu Ile Met Phe Tyr His Lys Arg Gln Asn Glu Asp Ser Thr
  MISC_FEATURE (31)..(31): Xaa at this position is a single (one, 1) amino acid selected from the following options: Gly Pro Ala Val Leu Ile Met Cys Phe Tyr Trp Lys Arg Gln Asn Glu Asp Ser Thr
  MISC_FEATURE (32)..(32): Xaa at this position is a single (one, 1) amino acid selected from the following options: Pro Ala Val Leu Ile Met Phe Trp His Lys Arg Gln Asn Glu Ser Thr
  MISC_FEATURE (33)..(33): Xaa at this position is a single (one, 1) amino acid selected from the following options: Pro Ala Val Leu Ile Met Cys Phe Trp His Lys Arg Gln Asn Glu Asp Ser Thr
  MISC_FEATURE (34)..(34): Xaa at this position is a single (one, 1) amino acid selected from the following options: Gly Pro Ala Val Leu Ile Met Cys Phe His Lys Arg Gln Asn Glu Asp Ser Thr
  MISC_FEATURE (35)..(35): Xaa at this position is a single (one, 1) amino acid selected from the following options: Gly Ala Val Leu Met Cys Phe Tyr His Lys Arg Gln Asn Glu Asp Ser Thr
  MISC_FEATURE (36)..(36): Xaa at this position is a single (one, 1) amino acid selected from the following options: Gly Pro Ala Val Leu Ile Cys Phe His Lys Arg Gln Asn Glu Asp Ser Thr
  MISC_FEATURE (37)..(37): Xaa at this position is a single (one, 1) amino acid selected from the following options: Gly Pro Ala Val Leu Met Cys Phe Tyr Trp His Lys Arg Gln Glu Asp Ser Thr
  MISC_FEATURE (38)..(38): Xaa at this position is a single (one, 1) amino acid selected from the following options: Gly Pro Ala Val Ile Cys Trp Lys Arg Gln Asn Glu Asp Ser Thr
  MISC_FEATURE (39)..(39): Xaa at this position is a single (one, 1) amino acid selected from the following options: Gly Pro Ala Val Leu Ile Met Cys Tyr Lys Arg Gln Asn Glu Asp Ser Thr
  MISC_FEATURE (40)..(40): Xaa at this position is a single (one, 1) amino acid selected from the following options: Gly Ala Val Leu Ile Met Cys Tyr Trp His Lys Arg Gln Asn Glu Asp Ser Thr
  MISC_FEATURE (41)..(41): Xaa at this position is a single (one, 1) amino acid selected from the following options: Gly Ala Val Leu Ile Met Tyr Trp His Lys Arg Asn Glu Asp Thr
  MISC_FEATURE (42)..(42): Xaa at this position is a single (one, 1) amino acid selected from the following options: Pro Ala Val Leu Ile Phe Tyr His Lys Arg Gln Asn Glu Asp Ser Thr
  MISC_FEATURE (43)..(43): Xaa at this position is a single (one, 1) amino acid selected from the following options: Gly Pro Ala Leu Ile Met Cys Tyr Lys Gln Asn Glu Asp Ser
  MISC_FEATURE (44)..(44): Xaa at this position is a single (one, 1) amino acid selected from the following options: Gly Ala Val Leu Ile Met His Lys Arg Gln Asn Glu Asp Ser Thr
  MISC_FEATURE (45)..(45): Xaa at this position is a single (one, 1) amino acid selected from the following options: Gly Pro Ala Val Leu Ile Cys Tyr Trp His Lys Arg Gln Glu Asp Ser Thr
  MISC_FEATURE (46)..(46): Xaa at this position is a single (one, 1) amino acid selected from the following options: Gly Pro Ala Val Leu Ile Met Tyr Trp Lys Arg Gln Asn Glu Asp Ser
  MISC_FEATURE (47)..(47): Xaa at this position is a single (one, 1) amino acid selected from the following options: Gly Pro Ala Val Leu Met Cys Phe Trp His Lys Arg Gln Asn Glu Asp Ser Thr
  MISC_FEATURE (48)..(48): Xaa at this position is a single (one, 1) amino acid selected from the following options: Gly Ala Val Leu Met Tyr Trp His Lys Arg Asn Glu Asp Ser Thr
  MISC_FEATURE (49)..(49): Xaa at this position is a single (one, 1) amino acid selected from the following options: Gly Pro Ala Val Leu Ile Met Phe Tyr His Lys Arg Gln Asn Glu Asp Ser
  MISC_FEATURE (50)..(50): Xaa at this position is a single (one, 1) amino acid selected from the following options: Gly Pro Ala Val Leu Ile Cys Tyr His Lys Arg Asn Glu Asp Ser Thr
  MISC_FEATURE (51)..(51): Xaa at this position is a single (one, 1) amino acid selected from the following options: Gly Pro Ala Val Leu Ile Cys Phe Tyr His Lys Arg Gln Asn Glu Asp Ser Thr
  MISC_FEATURE (52)..(52): Xaa at this position is a single (one, 1) amino acid selected from the following options: Gly Pro Ala Val Leu Ile Phe Tyr His Lys Arg Gln Asn Glu Asp Ser Thr
  MISC_FEATURE (53)..(53): Xaa at this position is a single (one, 1) amino acid selected from the following options: Gly Pro Ala Val Leu Cys Phe Tyr His Lys Arg Asn Glu Asp Ser Thr
  MISC_FEATURE (54)..(54): Xaa at this position is a single (one, 1) amino acid selected from the following options: Gly Pro Ala Val Leu Ile Met Phe Tyr Trp His Lys Arg Gln Asn Glu Asp
  MISC_FEATURE (55)..(55): Xaa at this position is a single (one, 1) amino acid selected from the following options: Pro Ala Val Leu Ile Met Cys Tyr Trp His Lys Arg Gln Glu Asp Ser Thr
  MISC_FEATURE (56)..(56): Xaa at this position is a single (one, 1) amino acid selected from the following options: Gly Pro Ala Val Leu Ile Cys Tyr Lys Arg Gln Glu Asp Ser Thr
  MISC_FEATURE (57)..(57): Xaa at this position is a single (one, 1) amino acid selected from the following options: Gly Ala Val Leu Ile Cys Phe Tyr His Lys Arg Gln Asn Glu Asp Ser Thr
  MISC_FEATURE (58)..(58): Xaa at this position is a single (one, 1) amino acid selected from the following options: Gly Ala Val Leu Ile Met Phe Tyr His Lys Arg Gln Glu Asp Ser Thr
  MISC_FEATURE (59)..(59): Xaa at this position is a single (one, 1) amino acid selected from the following options: Gly Pro Ala Val Leu Ile Met Tyr Trp His Lys Arg Gln Asn Glu Asp Ser Thr
  MISC_FEATURE (60)..(60): Xaa at this position is a single (one, 1) amino acid selected from the following options: Gly Pro Ala Leu Ile Phe Tyr His Lys Arg Gln Asn Glu Asp Ser Thr
  MISC_FEATURE (61)..(61): Xaa at this position is a single (one, 1) amino acid selected from the following options: Gly Pro Ala Val Leu Met Cys Phe His Lys Arg Gln Glu Asp Ser Thr
  MISC_FEATURE (62)..(62): Xaa at this position is a single (one, 1) amino acid selected from the following options: Gly Pro Ala Val Leu Ile Met Phe Tyr Trp His Lys Arg Gln Glu Asp Ser Thr
  MISC_FEATURE (63)..(63): Xaa at this position is a single (one, 1) amino acid selected from the following options: Gly Ala Leu Ile Met Cys Phe His Lys Arg Gln Asn Glu Asp Ser Thr
  MISC_FEATURE (64)..(64): Xaa at this position is a single (one, 1) amino acid selected from the following options: Gly Pro Ala Val Leu Ile Cys Tyr Trp His Lys Arg Gln Asn Glu Asp Ser Thr
  MISC_FEATURE (65)..(65): Xaa at this position is a single (one, 1) amino acid selected from the following options: Gly Pro Ala Val Leu Ile Met Phe Tyr His Lys Arg Gln Asn Glu Asp Ser Thr
  MISC_FEATURE (66)..(66): Xaa at this position is a single (one, 1) amino acid selected from the following options: Gly Pro Ala Val Leu Ile Met Cys Phe Trp His Lys Arg Gln Asn Glu Asp Ser Thr
  MISC_FEATURE (67)..(67): Xaa at this position is a single (one, 1) amino acid selected from the following options: Gly Pro Ala Val Leu Ile Cys Phe Tyr His Lys Arg Gln Asn Glu Asp Ser Thr
  MISC_FEATURE (68)..(68): Xaa at this position is a single (one, 1) amino acid selected from the following options: Gly Pro Ala Val Leu Ile Met Cys Phe His Lys Arg Gln Asn Glu Asp Ser Thr
  MISC_FEATURE (69)..(69): Xaa at this position is a single (one, 1) amino acid selected from the following options: Gly Pro Ala Val Leu Ile Met Phe Tyr Trp Lys Arg Gln Asn Glu Asp Ser Thr
  MISC_FEATURE (70)..(70): Xaa at this position is a single (one, 1) amino acid selected from the following options: Gly Pro Ala Leu Ile Met Cys Phe Tyr His Lys Arg Gln Asn Glu Ser Thr
  MISC_FEATURE (71)..(71): Xaa at this position is a single (one, 1) amino acid selected from the following options: Gly Ala Val Leu Ile Met Cys Phe Lys Arg Gln Asn Glu Ser Thr
  MISC_FEATURE (72)..(72): Xaa at this position is a single (one, 1) amino acid selected from the following options: Gly Pro Ala Val Leu Ile Met Cys Tyr Trp His Lys Arg Gln Asn Glu Ser Thr
  MISC_FEATURE (73)..(73): Xaa at this position is a single (one, 1) amino acid selected from the following options: Gly Pro Ala Val Leu Met Phe Tyr Trp His Lys Arg Gln Asn Glu Asp Ser Thr
  MISC_FEATURE (74)..(74): Xaa at this position is a single (one, 1) amino acid selected from the following options: Gly Pro Ala Val Leu Ile Tyr Trp His Lys Gln Glu Asp Ser Thr
  MISC_FEATURE (75)..(75): Xaa at this position is a single (one, 1) amino acid selected from the following options: Gly Pro Ala Val Leu Ile Met Cys Phe Lys Arg Gln Glu Ser Thr
  MISC_FEATURE (76)..(76): Xaa at this position is a single (one, 1) amino acid selected from the following options: Gly Pro Ala Val Leu Ile Met Cys His Lys Arg Gln Glu Asp Ser Thr
  MISC_FEATURE (77)..(77): Xaa at this position is a single (one, 1) amino acid selected from the following options: Gly Pro Ala Val Leu Ile Met Cys Trp Lys Arg Gln Asn Glu Asp Ser Thr
  MISC_FEATURE (78)..(78): Xaa at this position is a single (one, 1) amino acid selected from the following options: Pro Ala Val Leu Ile Met Cys Phe Trp His Lys Arg Gln Glu Asp Ser Thr
  MISC_FEATURE (79)..(79): Xaa at this position is a single (one, 1) amino acid selected from the following options: Gly Pro Ala Val Leu Ile Met Cys Phe Tyr Trp His Arg Gln Asn Glu Asp Ser Thr
  MISC_FEATURE (80)..(80): Xaa at this position is a single (one, 1) amino acid selected from the following options: Gly Pro Ala Val Leu Ile Cys Phe Tyr Lys Arg Gln Asn Glu Asp Ser Thr
  MISC_FEATURE (81)..(81): Xaa at this position is a single (one, 1) amino acid selected from the following options: Gly Pro Ala Val Leu Ile Met Phe Tyr Trp His Lys Arg Gln Asn Glu Asp Ser Thr
  MISC_FEATURE (82)..(82): Xaa at this position is a single (one, 1) amino acid selected from the following options: Gly Ala Val Leu Ile Met Cys Phe Tyr Trp His Lys Arg Gln Asn Glu Asp Ser Thr
  MISC_FEATURE (83)..(83): Xaa at this position is a single (one, 1) amino acid selected from the following options: Gly Pro Ala Val Leu Ile Met Cys Phe Tyr His Lys Arg Gln Glu Asp Ser Thr
  MISC_FEATURE (84)..(84): Xaa at this position is a single (one, 1) amino acid selected from the following options: Gly Pro Ala Val Leu Ile Met Cys Phe Tyr Trp His Lys Arg Gln Asn Glu Asp Ser Thr
  MISC_FEATURE (85)..(85): Xaa at this position is a single (one, 1) amino acid selected from the following options: Gly Pro Ala Val Leu Ile Met Cys Phe Tyr Trp Lys Arg Gln Asn Glu Asp Ser Thr
  MISC_FEATURE (86)..(86): Xaa at this position is a single (one, 1) amino acid selected from the following options: Gly Pro Ala Val Leu Ile Met Cys Phe Tyr His Lys Arg Gln Asn Glu Asp Ser Thr
  MISC_FEATURE (87)..(87): Xaa at this position is a single (one, 1) amino acid selected from the following options: Gly Pro Ala Val Leu Ile Met Phe Tyr Trp His Lys Arg Gln Glu Ser Thr
  MISC_FEATURE (88)..(88): Xaa at this position is a single (one, 1) amino acid selected from the following options: Pro Ala Val Leu Ile Met Cys Phe Tyr Trp His Lys Arg Gln Asn Glu Ser
  MISC_FEATURE (89)..(89): Xaa at this position is a single (one, 1) amino acid selected from the following options: Gly Pro Ala Val Leu Ile Met Cys Phe Tyr Trp Lys Arg Gln Asn Glu Asp Ser Thr
  MISC_FEATURE (90)..(90): Xaa at this position is a single (one, 1) amino acid selected from the following options: Gly Pro Ala Val Leu Ile Met Cys Phe Tyr Trp Lys Arg Gln Asn Glu Asp Ser Thr
  MISC_FEATURE (91)..(91): Xaa at this position is a single (one, 1) amino acid selected from the following options: Gly Pro Ala Val Leu Met Cys Phe His Lys Arg Gln Glu Asp Ser Thr
  MISC_FEATURE (92)..(92): Xaa at this position is a single (one, 1) amino acid selected from the following options: Gly Pro Ala Val Leu Ile Met Cys Phe Tyr His Arg Gln Asn Glu Ser Thr
  MISC_FEATURE (93)..(93): Xaa at this position is a single (one, 1) amino acid selected from the following options: Gly Ala Val Leu Ile Met Cys Phe Tyr Trp His Lys Arg Gln Asn Glu Asp Ser Thr
  MISC_FEATURE (94)..(94): Xaa at this position is a single (one, 1) amino acid selected from the following options: Gly Pro Ala Val Leu Ile Met Cys Phe Tyr His Lys Arg Asn Glu Asp Ser Thr
  MISC_FEATURE (95)..(95): Xaa at this position is a single (one, 1) amino acid selected from the following options: Gly Pro Ala Val Leu Ile Met Cys Phe Tyr Trp His Lys Arg Gln Asn Glu Asp Ser Thr
  MISC_FEATURE (96)..(96): Xaa at this position is a single (one, 1) amino acid selected from the following options: Gly Pro Ala Val Leu Ile Met Cys Phe Tyr Trp His Lys Arg Gln Asn Glu Asp Ser Thr
  MISC_FEATURE (97)..(97): Xaa at this position is a single (one, 1) amino acid selected from the following options: Gly Pro Ala Val Leu Ile Met Cys Phe Trp His Lys Arg Gln Asn Glu Ser Thr
  MISC_FEATURE (98)..(98): Xaa at this position is a single (one, 1) amino acid selected from the following options: Gly Pro Ala Val Leu Ile Met Cys Phe Tyr Trp His Lys Arg Gln Asn Asp Ser Thr
  MISC_FEATURE (99)..(99): Xaa at this position is a single (one, 1) amino acid selected from the following options: Gly Pro Ala Val Leu Ile Met Cys Phe Tyr Trp His Lys Arg Gln Asn Glu Asp Ser Thr
  MISC_FEATURE (100)..(100): Xaa at this position is a single (one, 1) amino acid selected from the following options: Gly Pro Ala Val Leu Ile Met Phe Tyr His Lys Arg Gln Asn Glu Asp Ser Thr
  MISC_FEATURE (101)..(101): Xaa at this position is a single (one, 1) amino acid selected from the following options: Gly Pro Ala Val Leu Ile Met Cys Phe Trp Lys Arg Gln Asn Glu Asp Ser Thr
  MISC_FEATURE (102)..(102): Xaa at this position is a single (one, 1) amino acid selected from the following options: Gly Pro Ala Val Leu Ile Met Cys Phe Tyr Trp His Lys Arg Gln Asn Glu Asp Ser Thr
  MISC_FEATURE (103)..(103): Xaa at this position is a single (one, 1) amino acid selected from the following options: Gly Pro Ala Val Leu Ile Met Cys Phe Tyr Trp His Lys Arg Gln Asn Glu Asp Ser Thr
  MISC_FEATURE (104)..(104): Xaa at this position is a single (one, 1) amino acid selected from the following options: Gly Pro Ala Val Leu Ile Met Cys Phe Tyr Trp His Lys Arg Gln Asn Glu Ser Thr
  MISC_FEATURE (105)..(105): Xaa at this position is a single (one, 1) amino acid selected from the following options: Gly Pro Ala Val Leu Ile Met Cys Phe Tyr His Lys Arg Gln Asn Glu Asp Ser Thr
  MISC_FEATURE (106)..(106): Xaa at this position is a single (one, 1) amino acid selected from the following options: Gly Pro Ala Val Leu Ile Met Cys Phe Tyr Trp His Lys Arg Gln Asn Glu Asp Ser Thr
  MISC_FEATURE (107)..(107): Xaa at this position is a single (one, 1) amino acid selected from the following options: Gly Pro Ala Val Leu Ile Met Cys Phe Tyr Trp His Lys Arg Gln Asn Glu Asp Ser Thr
  MISC_FEATURE (108)..(108): Xaa at this position is a single (one, 1) amino acid selected from the following options: Gly Pro Ala Val Leu Ile Met Cys Phe Tyr His Lys Arg Gln Asn Glu Asp Ser Thr
  MISC_FEATURE (109)..(109): Xaa at this position is a single (one, 1) amino acid selected from the following options: Gly Pro Ala Val Leu Ile Met Cys Phe Tyr His Lys Arg Gln Asn Glu Asp Ser Thr
  MISC_FEATURE (110)..(110): Xaa at this position is a single (one, 1) amino acid selected from the following options: Gly Pro Ala Val Leu Ile Met Cys Phe Tyr Trp His Lys Arg Gln Asn Glu Asp Ser Thr
  MISC_FEATURE (111)..(111): Xaa at this position is a single (one, 1) amino acid selected from the following options: Gly Pro Ala Val Leu Ile Met Cys Phe Tyr Trp His Lys Arg Gln Asn Glu Asp Ser Thr
  MISC_FEATURE (112)..(112): Xaa at this position is a single (one, 1) amino acid selected from the following options: Gly Pro Ala Val Leu Ile Met Cys Phe Tyr Trp Lys Arg Gln Asn Glu Asp Ser Thr
  MISC_FEATURE (113)..(113): Xaa at this position is a single (one, 1) amino acid selected from the following options: Gly Pro Ala Val Leu Ile Met Cys Phe Tyr Trp His Lys Arg Gln Asn Glu Asp Ser Thr
  MISC_FEATURE (114)..(114): Xaa at this position is a single (one, 1) amino acid selected from the following options: Gly Pro Ala Val Leu Ile Met Cys Phe Tyr Trp His Lys Arg Gln Asn Glu Asp Ser Thr
  MISC_FEATURE (115)..(115): Xaa at this position is a single (one, 1) amino acid selected from the following options: Gly Pro Ala Val Leu Ile Met Cys Phe Tyr Trp His Lys Arg Gln Asn Glu Asp Ser Thr
  MISC_FEATURE (116)..(116): Xaa at this position is a single (one, 1) amino acid selected from the following options: Gly Pro Ala Val Leu Ile Met Cys Phe Tyr Trp His Lys Arg Gln Asn Glu Asp Ser Thr
  MISC_FEATURE (117)..(117): Xaa at this position is a single (one, 1) amino acid selected from the following options: Gly Pro Ala Val Leu Ile Met Cys Phe Tyr Trp Lys Arg Gln Asn Glu Asp Ser Thr
  MISC_FEATURE (118)..(118): Xaa at this position is a single (one, 1) amino acid selected from the following options: Gly Pro Ala Val Leu Ile Met Cys Phe Tyr Trp His Lys Arg Gln Asn Glu Asp Ser Thr
  MISC_FEATURE (119)..(119): Xaa at this position is a single (one, 1) amino acid selected from the following options: Gly Pro Ala Val Leu Ile Met Cys Phe Tyr Trp His Lys Arg Gln Asn Glu Asp Ser Thr
  MISC_FEATURE (120)..(120): Xaa at this position is a single (one, 1) amino acid selected from the following options: Gly Pro Ala Val Leu Ile Met Cys Phe Tyr His Lys Arg Gln Asn Glu Asp Ser Thr
  MISC_FEATURE (121)..(121): Xaa at this position is a single (one, 1) amino acid selected from the following options: Gly Pro Ala Val Leu Ile Met Cys Phe Tyr Trp His Lys Arg Gln Asn Glu Asp Ser Thr
  MISC_FEATURE (122)..(122): Xaa at this position is a single (one, 1) amino acid selected from the following options: Gly Pro Ala Val Leu Ile Met Cys Phe Tyr Trp His Lys Arg Gln Asn Glu Asp Ser Thr
  MISC_FEATURE (123)..(123): Xaa at this position is a single (one, 1) amino acid selected from the following options: Gly Pro Ala Val Leu Ile Met Cys Phe Tyr Trp His Lys Arg Gln Asn Glu Asp Ser Thr
  MISC_FEATURE (124)..(124): Xaa at this position is a single (one, 1) amino acid selected from the following options: Gly Pro Ala Val Leu Ile Met Cys Phe Tyr Trp Lys Arg Gln Asn Glu Asp Ser Thr
  MISC_FEATURE (125)..(125): Xaa at this position is a single (one, 1) amino acid selected from the following options: Gly Pro Ala Val Leu Ile Met Cys Phe Tyr Trp His Lys Arg Gln Asn Glu Asp Ser Thr
  MISC_FEATURE (126)..(126): Xaa at this position is a single (one, 1) amino acid selected from the following options: Gly Pro Ala Val Leu Ile Met Phe His Lys Arg Gln Asn Glu Asp Ser Thr
  MISC_FEATURE (127)..(127): Xaa at this position is a single (one, 1) amino acid selected from the following options: Gly Pro Ala Val Leu Ile Met Cys Phe Tyr Trp His Lys Arg Glu Asp Ser Thr
  MISC_FEATURE (128)..(128): Xaa at this position is a single (one, 1) amino acid selected from the following options: Gly Ala Val Leu Ile Met Cys Phe Tyr Trp His Lys Arg Gln Asn Glu Asp Ser Thr
  MISC_FEATURE (129)..(129): Xaa at this position is a single (one, 1) amino acid selected from the following options: Gly Pro Ala Val Leu Ile Met Cys Phe Tyr His Lys Arg Gln Glu Asp Ser Thr
  MISC_FEATURE (130)..(130): Xaa at this position is a single (one, 1) amino acid selected from the following options: Gly Pro Ala Val Leu Ile Met Cys Phe Tyr His Lys Arg Gln Asn Glu Asp Ser Thr
  MISC_FEATURE (131)..(131): Xaa at this position is a single (one, 1) amino acid selected from the following options: Gly Pro Ala Val Leu Ile Met Cys Phe His Lys Arg Gln Asn Glu Asp Ser Thr
  MISC_FEATURE (132)..(132): Xaa at this position is a single (one, 1) amino acid selected from the following options: Gly Pro Ala Val Leu Met Phe Tyr His Lys Arg Gln Asn Glu Asp Ser Thr
  MISC_FEATURE (133)..(133): Xaa at this position is a single (one, 1) amino acid selected from the following options: Gly Pro Ala Val Leu Ile Met Cys Phe Tyr His Lys Arg Gln Asn Glu Asp Ser Thr
  MISC_FEATURE (134)..(134): Xaa at this position is a single (one, 1) amino acid selected from the following options: Gly Pro Ala Val Leu Ile Met Cys Phe Tyr Trp His Lys Arg Gln Asn Glu Asp Ser
  MISC_FEATURE (135)..(135): Xaa at this position is a single (one, 1) amino acid selected from the following options: Gly Pro Ala Val Leu Ile Met Cys Phe Tyr Lys Arg Gln Asn Glu Asp Ser Thr
  MISC_FEATURE (136)..(136): Xaa at this position is a single (one, 1) amino acid selected from the following options: Gly Pro Ala Val Leu Ile Met Phe Tyr Trp Lys Arg Gln Asn Glu Asp Ser Thr
  MISC_FEATURE (137)..(137): Xaa at this position is a single (one, 1) amino acid selected from the following options: Gly Pro Ala Val Leu Met Cys Phe His Lys Arg Glu Asp Ser Thr
  MISC_FEATURE (138)..(138): Xaa at this position is a single (one, 1) amino acid selected from the following options: Gly Pro Ala Val Leu Ile Met Cys Phe Tyr Lys Arg Asn Glu Asp Ser Thr
  MISC_FEATURE (139)..(139): Xaa at this position is a single (one, 1) amino acid selected from the following options: Gly Pro Ala Val Leu Ile Met Phe Tyr Trp Lys Arg Gln Asn Glu Asp Ser Thr
  MISC_FEATURE (140)..(140): Xaa at this position is a single (one, 1) amino acid selected from the following options: Gly Ala Val Leu Ile Met Phe Tyr Trp His Lys Arg Gln Asn Glu Asp Ser Thr
  MISC_FEATURE (141)..(141): Xaa at this position is a single (one, 1) amino acid selected from the following options: Gly Pro Ala Val Leu Ile Cys Phe Tyr Trp His Lys Arg Gln Glu Asp Ser Thr
  MISC_FEATURE (142)..(142): Xaa at this position is a single (one, 1) amino acid selected from the following options: Gly Pro Ala Val Leu Ile Cys Tyr His Lys Arg Gln Asn Glu Asp Ser Thr
  MISC_FEATURE (143)..(143): Xaa at this position is a single (one, 1) amino acid selected from the following options: Gly Pro Ala Val Leu Ile Met Cys Trp His Lys Arg Gln Asn Glu Asp Ser Thr
  MISC_FEATURE (144)..(144): Xaa at this position is a single (one, 1) amino acid selected from the following options: Gly Pro Ala Val Leu Ile Met Cys Phe Tyr Trp His Lys Arg Gln Glu Asp Ser Thr
  MISC_FEATURE (145)..(145): Xaa at this position is a single (one, 1) amino acid selected from the following options: Gly Pro Ala Val Leu Ile Met Phe Tyr His Lys Arg Gln Glu Asp Ser
  MISC_FEATURE (146)..(146): Xaa at this position is a single (one, 1) amino acid selected from the following options: Gly Pro Ala Val Leu Met Phe His Lys Arg Gln Asn Glu Asp Ser Thr
  MISC_FEATURE (147)..(147): Xaa at this position is a single (one, 1) amino acid selected from the following options: Gly Pro Ala Val Leu Ile Met Phe Trp His Lys Arg Gln Asn Glu Asp Ser Thr
  MISC_FEATURE (148)..(148): Xaa at this position is a single (one, 1) amino acid selected from the following options: Gly Pro Ala Val Leu Ile Met Cys Phe His Lys Arg Gln Glu Asp Ser Thr
  MISC_FEATURE (149)..(149): Xaa at this position is a single (one, 1) amino acid selected from the following options: Gly Pro Ala Val Leu Ile Met Cys Phe Tyr Trp Lys Arg Gln Asn Glu Asp Ser Thr
  MISC_FEATURE (150)..(150): Xaa at this position is a single (one, 1) amino acid selected from the following options: Gly Ala Val Leu Met Cys Phe Trp His Lys Arg Gln Asn Glu Asp Ser
  MISC_FEATURE (151)..(151): Xaa at this position is a single (one, 1) amino acid selected from the following options: Gly Pro Ala Val Leu Ile Met Cys Phe Tyr His Lys Arg Gln Asn Glu Asp Ser Thr
  MISC_FEATURE (152)..(152): Xaa at this position is a single (one, 1) amino acid selected from the following options: Gly Ala Val Leu Met Phe Tyr Lys Arg Gln Glu Asp Ser
  MISC_FEATURE (153)..(153): Xaa at this position is a single (one, 1) amino acid selected from the following options: Gly Ala Val Leu Ile Met Cys Phe Tyr His Lys Arg Gln Asn Glu Asp Ser Thr
  MISC_FEATURE (154)..(154): Xaa at this position is a single (one, 1) amino acid selected from the following options: Gly Pro Ala Val Leu Ile Met Phe His Lys Arg Gln Asn Glu Asp Ser Thr
  MISC_FEATURE (155)..(155): Xaa at this position is a single (one, 1) amino acid selected from the following options: Gly Pro Ala Val Leu Ile Met Phe His Lys Arg Gln Glu Asp Ser
  MISC_FEATURE (156)..(156): Xaa at this position is a single (one, 1) amino acid selected from the following options: Gly Pro Ala Val Leu Ile Met Cys Phe Tyr Trp His Lys Arg Gln Asn Glu Asp Ser Thr
  MISC_FEATURE (157)..(157): Xaa at this position is a single (one, 1) amino acid selected from the following options: Gly Pro Ala Val Leu Ile Met Phe Tyr Trp Lys Arg Gln Glu Ser Thr
  MISC_FEATURE (158)..(158): Xaa at this position is a single (one, 1) amino acid selected from the following options: Gly Ala Val Leu Met Cys Phe Tyr His Lys Arg Gln Glu Asp Ser Thr
  MISC_FEATURE (159)..(159): Xaa at this position is a single (one, 1) amino acid selected from the following options: Gly Pro Ala Leu Ile Met Cys Phe Tyr His Lys Arg Gln Asn Glu Asp Ser Thr
  MISC_FEATURE (160)..(160): Xaa at this position is a single (one, 1) amino acid selected from the following options: Gly Pro Ala Val Leu Ile Met Cys Phe Tyr His Lys Arg Gln Asn Glu Asp Ser Thr
  MISC_FEATURE (161)..(161): Xaa at this position is a single (one, 1) amino acid selected from the following options: Gly Ala Val Leu Ile Met Cys Phe Tyr His Lys Arg Gln Glu Asp Ser Thr
  MISC_FEATURE (162)..(162): Xaa at this position is a single (one, 1) amino acid selected from the following options: Gly Ala Val Leu Ile Met Cys Phe Tyr His Lys Arg Gln Glu Asp Ser Thr
  MISC_FEATURE (163)..(163): Xaa at this position is a single (one, 1) amino acid selected from the following options: Gly Pro Ala Leu Ile Met Cys Phe His Lys Arg Gln Asn Glu Asp Ser Thr
  MISC_FEATURE (164)..(164): Xaa at this position is a single (one, 1) amino acid selected from the following options: Gly Ala Val Leu Ile Met Tyr His Lys Arg Gln Asn Glu Asp Ser Thr
  MISC_FEATURE (165)..(165): Xaa at this position is a single (one, 1) amino acid selected from the following options: Gly Pro Ala Val Leu Ile Met Phe Tyr Trp His Lys Arg Gln Glu Asp Ser
  MISC_FEATURE (166)..(166): Xaa at this position is a single (one, 1) amino acid selected from the following options: Gly Ala Val Leu Met Cys Phe His Lys Arg Gln Glu Asp Ser Thr
  MISC_FEATURE (167)..(167): Xaa at this position is a single (one, 1) amino acid selected from the following options: Gly Pro Ala Val Leu Ile Cys Phe Tyr His Lys Arg Gln Asn Glu Asp Ser Thr
  MISC_FEATURE (168)..(168): Xaa at this position is a single (one, 1) amino acid selected from the following options: Gly Pro Ala Val Leu Ile Met Cys Phe Tyr His Lys Arg Gln Asn Glu Ser Thr
  MISC_FEATURE (169)..(169): Xaa at this position is a single (one, 1) amino acid selected from the following options: Gly Pro Ala Val Leu Ile Met Cys Tyr Lys Arg Gln Asn Glu Asp Ser Thr
  MISC_FEATURE (170)..(170): Xaa at this position is a single (one, 1) amino acid selected from the following options: Gly Ala Val Leu Ile Met Tyr His Lys Arg Gln Asn Glu Asp Ser Thr
  MISC_FEATURE (171)..(171): Xaa at this position is a single (one, 1) amino acid selected from the following options: Pro Ala Leu Ile Met Phe Tyr His Lys Arg Gln Asn Glu Asp Ser Thr
  MISC_FEATURE (172)..(172): Xaa at this position is a single (one, 1) amino acid selected from the following options: Gly Pro Ala Val Leu Ile Met Phe His Lys Arg Gln Asn Glu Asp Thr
  MISC_FEATURE (173)..(173): Xaa at this position is a single (one, 1) amino acid selected from the following options: Gly Pro Ala Val Leu Tyr His Lys Arg Gln Asn Glu Asp Ser Thr
  MISC_FEATURE (174)..(174): Xaa at this position is a single (one, 1) amino acid selected from the following options: Gly Pro Ala Leu Ile Met Phe Tyr His Lys Arg Gln Asn Glu Asp Ser Thr
  MISC_FEATURE (176)..(176): Xaa at this position is a single (one, 1) amino acid selected from the following options: Gly Pro Ala Val Leu Ile Met Phe Tyr His Lys Arg Gln Asn Glu Asp Ser Thr
  MISC_FEATURE (177)..(177): Xaa at this position is a single (one, 1) amino acid selected from the following options: Gly Pro Ala Leu Ile Met Tyr Lys Arg Gln Asn Glu Asp Ser Thr
  MISC_FEATURE (178)..(178): Xaa at this position is a single (one, 1) amino acid selected from the following options: Gly Pro Ala Val Leu Ile Phe His Lys Arg Gln Asn Glu Asp Ser
  MISC_FEATURE (179)..(179): Xaa at this position is a single (one, 1) amino acid selected from the following options: Ala Val Leu Ile Met Phe Tyr His Lys Arg Glu Asp Ser Thr
  MISC_FEATURE (180)..(180): Xaa at this position is a single (one, 1) amino acid selected from the following options: Gly Pro Ala Val Leu Ile Met Cys Phe Tyr His Lys Arg Gln Asn Glu Asp Ser Thr
  MISC_FEATURE (182)..(182): Xaa at this position is a single (one, 1) amino acid selected from the following options: Gly Pro Ala Leu Ile Cys Phe Trp His Lys Arg Gln Asn Glu Asp Ser Thr
  MISC_FEATURE (183)..(183): Xaa at this position is a single (one, 1) amino acid selected from the following options: Pro Ala Val Leu Ile Met Tyr His Lys Arg Gln Asn Glu Asp Ser Thr
  MISC_FEATURE (184)..(184): Xaa at this position is a single (one, 1) amino acid selected from the following options: Gly Pro Ala Val Leu Ile Met His Lys Arg Gln Asn Glu Asp Ser Thr
  MISC_FEATURE (185)..(185): Xaa at this position is a single (one, 1) amino acid selected from the following options: Gly Pro Ala Val Leu Ile Met Phe Trp His Lys Arg Gln Asn Glu Asp Ser Thr
  MISC_FEATURE (186)..(186): Xaa at this position is a single (one, 1) amino acid selected from the following options: Gly Ala Val Leu Ile Met Cys Phe His Lys Arg Gln Glu Asp Thr
  MISC_FEATURE (187)..(187): Xaa at this position is a single (one, 1) amino acid selected from the following options: Gly Pro Ala Val Leu Ile Met Cys Phe Trp His Lys Arg Gln Asn Glu Asp Ser Thr
  MISC_FEATURE (188)..(188): Xaa at this position is a single (one, 1) amino acid selected from the following options: Gly Pro Ala Leu Ile Cys Tyr His Lys Arg Gln Asn Glu Asp Thr
  MISC_FEATURE (189)..(189): Xaa at this position is a single (one, 1) amino acid selected from the following options: Gly Pro Ala Val Leu Ile Met Phe Tyr His Lys Arg Gln Asn Glu Asp Thr
  MISC_FEATURE (190)..(190): Xaa at this position is a single (one, 1) amino acid selected from the following options: Gly Pro Ala Val Leu Ile Met Cys His Lys Arg Gln Asn Glu Asp Ser Thr
  MISC_FEATURE (191)..(191): Xaa at this position is a single (one, 1) amino acid selected from the following options: Gly Pro Ala Val Leu Ile Met Phe Trp His Lys Arg Gln Asn Glu Asp Ser Thr
  MISC_FEATURE (192)..(192): Xaa at this position is a single (one, 1) amino acid selected from the following options: Gly Ala Val Leu Ile Phe Tyr Trp His Lys Arg Gln Asn Glu Asp Ser Thr
  MISC_FEATURE (193)..(193): Xaa at this position is a single (one, 1) amino acid selected from the following options: Pro Ala Val Leu Ile Met Phe His Lys Arg Gln Asn Glu Asp Ser Thr
  MISC_FEATURE (194)..(194): Xaa at this position is a single (one, 1) amino acid selected from the following options: Gly Pro Ala Val Leu Ile Cys Phe His Lys Arg Gln Asn Glu Asp Ser Thr
  MISC_FEATURE (195)..(195): Xaa at this position is a single (one, 1) amino acid selected from the following options: Gly Pro Ala Val Leu Ile Cys Phe Tyr Trp His Lys Arg Gln Asn Glu Asp Ser Thr
  MISC_FEATURE (196)..(196): Xaa at this position is a single (one, 1) amino acid selected from the following options: Pro Ala Val Leu Ile Met Phe Tyr His Lys Arg Gln Asn Glu Asp Ser Thr
  MISC_FEATURE (197)..(197): Xaa at this position is a single (one, 1) amino acid selected from the following options: Gly Pro Ala Val Leu Ile Met Cys Phe Tyr Trp His Lys Arg Gln Asn Glu Asp Ser Thr
  MISC_FEATURE (198)..(198): Xaa at this position is a single (one, 1) amino acid selected from the following options: Gly Pro Ala Leu Ile Phe Tyr His Lys Arg Gln Asn Glu Asp Ser Thr
  MISC_FEATURE (199)..(199): Xaa at this position is a single (one, 1) amino acid selected from the following options: Gly Pro Ala Val Leu Ile Met Cys Tyr Trp His Lys Arg Gln Asn Glu Asp Ser Thr
  MISC_FEATURE (200)..(200): Xaa at this position is a single (one, 1) amino acid selected from the following options: Gly Pro Ala Val Leu Ile Met Tyr Trp His Lys Gln Asn Glu Asp Ser Thr
  MISC_FEATURE (201)..(201): Xaa at this position is a single (one, 1) amino acid selected from the following options: Gly Pro Ala Val Leu Ile Cys Phe Tyr Lys Arg Gln Asn Glu Asp Ser Thr
  MISC_FEATURE (202)..(202): Xaa at this position is a single (one, 1) amino acid selected from the following options: Gly Pro Ala Val Leu Ile Met Phe Tyr Trp His Lys Arg Gln Asn Glu Asp Ser Thr
  MISC_FEATURE (203)..(203): Xaa at this position is a single (one, 1) amino acid selected from the following options: Gly Pro Ala Val Leu Ile Met Phe Tyr His Lys Arg Gln Asn Glu Asp Ser Thr
  MISC_FEATURE (204)..(204): Xaa at this position is a single (one, 1) amino acid selected from the following options: Gly Ala Val Leu Ile Met His Lys Arg Gln Asn Glu Asp Ser Thr
  MISC_FEATURE (205)..(205): Xaa at this position is a single (one, 1) amino acid selected from the following options: Gly Pro Ala Val Leu Ile Met Cys Phe Tyr Trp His Lys Arg Gln Asn Glu Asp Ser Thr
  MISC_FEATURE (206)..(206): Xaa at this position is a single (one, 1) amino acid selected from the following options: Gly Pro Ala Val Leu Ile Phe Tyr Trp His Lys Arg Gln Asn Glu Asp Ser Thr
  MISC_FEATURE (207)..(207): Xaa at this position is a single (one, 1) amino acid selected from the following options: Gly Pro Ala Leu Ile Cys His Lys Arg Gln Asn Glu Asp Ser Thr
  MISC_FEATURE (208)..(208): Xaa at this position is a single (one, 1) amino acid selected from the following options: Gly Pro Ala Val Leu Ile Met Cys Phe Tyr Trp His Lys Arg Gln Glu Asp Ser Thr
  MISC_FEATURE (209)..(209): Xaa at this position is a single (one, 1) amino acid selected from the following options: Gly Ala Val Ile Cys Phe Tyr His Lys Arg Gln Asn Glu Asp Ser Thr
  MISC_FEATURE (210)..(210): Xaa at this position is a single (one, 1) amino acid selected from the following options: Gly Ala Val Leu Ile Phe Tyr His Lys Arg Gln Asn Glu Asp Ser Thr
  MISC_FEATURE (211)..(211): Xaa at this position is a single (one, 1) amino acid selected from the following options: Gly Pro Ala Val Leu Ile Cys Phe His Lys Arg Gln Asn Glu Asp Ser Thr
  MISC_FEATURE (212)..(212): Xaa at this position is a single (one, 1) amino acid selected from the following options: Gly Pro Ala Val Leu Ile Met Cys Phe His Lys Arg Gln Glu Asp Ser Thr
  MISC_FEATURE (213)..(213): Xaa at this position is a single (one, 1) amino acid selected from the following options: Gly Pro Ala Val Leu Ile Met Phe Tyr His Lys Arg Gln Asn Glu Asp Ser Thr
  MISC_FEATURE (214)..(214): Xaa at this position is a single (one, 1) amino acid selected from the following options: Gly Pro Ala Val Leu Ile Met Phe Lys Arg Gln Asn Glu Asp Ser Thr
  MISC_FEATURE (215)..(215): Xaa at this position is a single (one, 1) amino acid selected from the following options: Pro Ala Val Leu Ile Met Cys Trp Lys Arg Gln Asn Glu Asp Ser Thr
  MISC_FEATURE (216)..(216): Xaa at this position is a single (one, 1) amino acid selected from the following options: Gly Pro Ala Val Leu Ile Met Cys Tyr His Lys Arg Gln Asn Glu Asp Ser Thr
  MISC_FEATURE (217)..(217): Xaa at this position is a single (one, 1) amino acid selected from the following options: Pro Ala Leu Ile Phe Trp His Lys Arg Gln Asn Glu Ser Thr
  MISC_FEATURE (218)..(218): Xaa at this position is a single (one, 1) amino acid selected from the following options: Gly Pro Val Leu Ile Phe His Lys Arg Gln Asn Glu Asp Ser Thr
  MISC_FEATURE (219)..(219): Xaa at this position is a single (one, 1) amino acid selected from the following options: Gly Pro Ala Val Leu Ile Met Phe Tyr His Lys Arg Gln Asn Glu Asp Ser Thr
  MISC_FEATURE (220)..(220): Xaa at this position is a single (one, 1) amino acid selected from the following options: Gly Pro Ala Val Leu Ile Cys Phe His Lys Arg Gln Asn Glu Asp Thr
XXXXXXXXXXXXXXXXXXXXXXXXXXXXXXXXXXXXXXXXXXXXXXXXXXXXXXXXXXXXXXXXXXXXXXXXXXXXXXXXXXXXXXXXXXXXXXXXXXXXXXXXXXXXXXXXXXXXXXXXXXXXXXXXXXXXXXXXXXXXXXXXXXXXXXXXXXXXXXXXXXXXXXXXXXXXXXHXXXXXHXXXXXXXXXXXXXXXXXXXXXXXXXXXXXXXXXXXXXXX

SEQ ID NO: 2 - protein, 220 aa, Artificial Sequence
  Designed; as detailed elsewhere in present application
  MISC_FEATURE (1)..(1): Xaa at this position is a single (one, 1) amino acid selected from the following options: Gly Pro Ala Val Leu Ile Met Cys Tyr His Lys Arg Gln Asn Glu Asp Ser Thr
  MISC_FEATURE (2)..(2): Xaa at this position is a single (one, 1) amino acid selected from the following options: Gly Pro Ala Val Cys Phe His Lys Arg Gln Asn Glu Asp Ser Thr
  MISC_FEATURE (3)..(3): Xaa at this position is a single (one, 1) amino acid selected from the following options: Gly Pro Ala Val Leu Ile Met Phe Tyr Trp Lys Arg Gln Asn Glu Asp Ser Thr
  MISC_FEATURE (4)..(4): Xaa at this position is a single (one, 1) amino acid selected from the following options: Gly Ala Val Leu Ile Met Phe His Lys Arg Gln Asn Glu Asp Ser Thr
  MISC_FEATURE (5)..(5): Xaa at this position is a single (one, 1) amino acid selected from the following options: Gly Pro Ala Val Leu Ile Met Cys Phe His Lys Arg Gln Glu Asp Ser Thr
  MISC_FEATURE (6)..(6): Xaa at this position is a single (one, 1) amino acid selected from the following options: Gly Pro Val Leu Ile Phe His Lys Arg Gln Glu Asp Ser Thr
  MISC_FEATURE (7)..(7): Xaa at this position is a single (one, 1) amino acid selected from the following options: Gly Pro Ala Leu Ile Met Cys Phe His Lys Arg Gln Asn Glu Ser Thr
  MISC_FEATURE (8)..(8): Xaa at this position is a single (one, 1) amino acid selected from the following options: Gly Pro Ala Val Leu Ile Met Lys Arg Gln Asn Glu Asp Ser Thr
  MISC_FEATURE (9)..(9): Xaa at this position is a single (one, 1) amino acid selected from the following options: Ala Val Leu Ile Phe Trp His Lys Arg Gln Asn Glu Asp Ser
  MISC_FEATURE (10)..(10): Xaa at this position is a single (one, 1) amino acid selected from the following options: Gly Pro Ala Leu Ile Phe Tyr Trp Lys Gln Asn Glu Asp Ser Thr
  MISC_FEATURE (11)..(11): Xaa at this position is a single (one, 1) amino acid selected from the following options: Gly Pro Ala Val Leu Met His Lys Arg Gln Asn Glu Asp Ser
  MISC_FEATURE (12)..(12): Xaa at this position is a single (one, 1) amino acid selected from the following options: Gly Pro Val Leu Ile Met Phe Tyr Trp His Lys Arg Gln Asn Glu Asp Ser Thr
  MISC_FEATURE (13)..(13): Xaa at this position is a single (one, 1) amino acid selected from the following options: Gly Pro Ala Val Leu Ile Tyr Trp His Lys Arg Gln Asn Glu Ser Thr
  MISC_FEATURE (14)..(14): Xaa at this position is a single (one, 1) amino acid selected from the following options: Gly Pro Ala Val Leu Ile Met Cys Tyr His Lys Arg Gln Asn Glu Asp Ser
  MISC_FEATURE (15)..(15): Xaa at this position is a single (one, 1) amino acid selected from the following options: Gly Pro Ala Leu Ile Cys Phe Lys Arg Gln Asn Glu Asp Ser Thr
  MISC_FEATURE (16)..(16): Xaa at this position is a single (one, 1) amino acid selected from the following options: Gly Pro Ala Val Leu Ile Met Phe Tyr Arg Gln Asn Glu Ser Thr
  MISC_FEATURE (17)..(17): Xaa at this position is a single (one, 1) amino acid selected from the following options: Gly Pro Ala Leu Ile Met Phe Tyr Trp Lys Arg Asn Glu Asp Ser Thr
  MISC_FEATURE (18)..(18): Xaa at this position is a single (one, 1) amino acid selected from the following options: Gly Pro Ala Val Leu Ile Cys Phe Tyr His Lys Arg Gln Asn Glu Asp Ser Thr
  MISC_FEATURE (19)..(19): Xaa at this position is a single (one, 1) amino acid selected from the following options: Gly Pro Ala Val Leu Ile Cys Tyr His Lys Arg Gln Asn Glu Asp Thr
  MISC_FEATURE (20)..(20): Xaa at this position is a single (one, 1) amino acid selected from the following options: Gly Pro Ala Val Leu Ile Met Cys Tyr His Lys Arg Asn Glu Asp Ser Thr
  MISC_FEATURE (21)..(21): Xaa at this position is a single (one, 1) amino acid selected from the following options: Gly Pro Ala Leu Phe Tyr Arg Gln Asn Glu Asp Ser Thr
  MISC_FEATURE (22)..(22): Xaa at this position is a single (one, 1) amino acid selected from the following options: Gly Pro Ala Val Leu Met Cys Phe Tyr Lys Arg Gln Asn Glu Asp Ser Thr
  MISC_FEATURE (23)..(23): Xaa at this position is a single (one, 1) amino acid selected from the following options: Gly Pro Ala Val Leu Ile Met Cys Gln Asn Glu Asp Ser
  MISC_FEATURE (24)..(24): Xaa at this position is a single (one, 1) amino acid selected from the following options: Gly Pro Ala Val Leu Phe His Lys Arg Glu Asp Ser Thr
  MISC_FEATURE (25)..(25): Xaa at this position is a single (one, 1) amino acid selected from the following options: Pro Ala Val Leu Ile Met Phe Tyr Lys Gln Asn Glu Asp Ser Thr
  MISC_FEATURE (26)..(26): Xaa at this position is a single (one, 1) amino acid selected from the following options: Gly Pro Ala Val Leu Ile Met Lys Arg Gln Asn Glu Asp Ser Thr
  MISC_FEATURE (27)..(27): Xaa at this position is a single (one, 1) amino acid selected from the following options: Gly Pro Ala Val Leu Ile Cys His Arg Gln Glu Asp Ser Thr
  MISC_FEATURE (28)..(28): Xaa at this position is a single (one, 1) amino acid selected from the following options: Gly Pro Ala Val Leu Ile Met Cys Phe Lys Arg Gln Asn Glu Asp Ser Thr
  MISC_FEATURE (29)..(29): Xaa at this position is a single (one, 1) amino acid selected from the following options: Gly Pro Ala Val Leu Ile Cys Phe His Lys Arg Gln Asn Glu Asp Ser Thr
  MISC_FEATURE (30)..(30): Xaa at this position is a single (one, 1) amino acid selected from the following options: Gly Pro Ala Val Leu Ile Met Phe Tyr His Lys Arg Gln Asn Glu Asp Ser Thr
  MISC_FEATURE (31)..(31): Xaa at this position is a single (one, 1) amino acid selected from the following options: Gly Pro Ala Val Leu Ile Met Cys Phe Tyr Trp Lys Arg Gln Asn Glu Asp Ser Thr
  MISC_FEATURE (32)..(32): Xaa at this position is a single (one, 1) amino acid selected from the following options: Pro Ala Val Leu Ile Met Phe Trp His Lys Arg Gln Asn Glu Ser Thr
  MISC_FEATURE (33)..(33): Xaa at this position is a single (one, 1) amino acid selected from the following options: Pro Ala Val Leu Ile Met Cys Phe Trp His Lys Arg Gln Asn Glu Asp Ser Thr
  MISC_FEATURE (34)..(34): Xaa at this position is a single (one, 1) amino acid selected from the following options: Gly Pro Ala Val Leu Ile Met Cys Phe His Lys Arg Gln Asn Glu Asp Ser Thr
  MISC_FEATURE (35)..(35): Xaa at this position is a single (one, 1) amino acid selected from the following options: Gly Ala Val Leu Met Cys Phe Tyr His Lys Arg Gln Asn Glu Asp Ser Thr
  MISC_FEATURE (36)..(36): Xaa at this position is a single (one, 1) amino acid selected from the following options: Gly Pro Ala Val Leu Ile Cys Phe His Lys Arg Gln Asn Glu Asp Ser Thr
  MISC_FEATURE (37)..(37): Xaa at this position is a single (one, 1) amino acid selected from the following options: Gly Pro Ala Val Leu Met Cys Phe Tyr Trp His Lys Arg Gln Glu Asp Ser Thr
  MISC_FEATURE (38)..(38): Xaa at this position is a single (one, 1) amino acid selected from the following options: Gly Pro Ala Val Ile Cys Trp Lys Arg Gln Asn Glu Asp Ser Thr
  MISC_FEATURE (39)..(39): Xaa at this position is a single (one, 1) amino acid selected from the following options: Gly Pro Ala Val Leu Ile Met Cys Tyr Lys Arg Gln Asn Glu Asp Ser Thr
  MISC_FEATURE (40)..(40): Xaa at this position is a single (one, 1) amino acid selected from the following options: Gly Ala Val Leu Ile Met Cys Tyr Trp His Lys Arg Gln Asn Glu Asp Ser Thr
  MISC_FEATURE (41)..(41): Xaa at this position is a single (one, 1) amino acid selected from the following options: Gly Ala Val Leu Ile Met Tyr Trp His Lys Arg Asn Glu Asp Thr
  MISC_FEATURE (42)..(42): Xaa at this position is a single (one, 1) amino acid selected from the following options: Pro Ala Val Leu Ile Phe Tyr His Lys Arg Gln Asn Glu Asp Ser Thr
  MISC_FEATURE (43)..(43): Xaa at this position is a single (one, 1) amino acid selected from the following options: Gly Pro Ala Leu Ile Met Cys Tyr Lys Gln Asn Glu Asp Ser
  MISC_FEATURE (44)..(44): Xaa at this position is a single (one, 1) amino acid selected from the following options: Gly Ala Val Leu Ile Met His Lys Arg Gln Asn Glu Asp Ser Thr
  MISC_FEATURE (45)..(45): Xaa at this position is a single (one, 1) amino acid selected from the following options: Gly Pro Ala Val Leu Ile Cys Tyr Trp His Lys Arg Gln Glu Asp Ser Thr
  MISC_FEATURE (46)..(46): Xaa at this position is a single (one, 1) amino acid selected from the following options: Gly Pro Ala Val Leu Ile Met Tyr Trp Lys Arg Gln Asn Glu Asp Ser
  MISC_FEATURE (47)..(47): Xaa at this position is a single (one, 1) amino acid selected from the following options: Gly Pro Ala Val Leu Met Cys Phe Trp His Lys Arg Gln Asn Glu Asp Ser Thr
  MISC_FEATURE (48)..(48): Xaa at this position is a single (one, 1) amino acid selected from the following options: Gly Ala Val Leu Met Tyr Trp His Lys Arg Asn Glu Asp Ser Thr
  MISC_FEATURE (49)..(49): Xaa at this position is a single (one, 1) amino acid selected from the following options: Gly Pro Ala Val Leu Ile Met Phe Tyr His Lys Arg Gln Asn Glu Asp Ser
  MISC_FEATURE (50)..(50): Xaa at this position is a single (one, 1) amino acid selected from the following options: Gly Pro Ala Val Leu Ile Cys Tyr His Lys Arg Asn Glu Asp Ser Thr
  MISC_FEATURE (51)..(51): Xaa at this position is a single (one, 1) amino acid selected from the following options: Gly Pro Ala Val Leu Ile Cys Phe Tyr His Lys Arg Gln Asn Glu Asp Ser Thr
  MISC_FEATURE (52)..(52): Xaa at this position is a single (one, 1) amino acid selected from the following options: Gly Pro Ala Val Leu Ile Phe Tyr His Lys Arg Gln Asn Glu Asp Ser Thr
  MISC_FEATURE (53)..(53): Xaa at this position is a single (one, 1) amino acid selected from the following options: Gly Pro Ala Val Leu Cys Phe Tyr His Lys Arg Asn Glu Asp Ser Thr
  MISC_FEATURE (54)..(54): Xaa at this position is a single (one, 1) amino acid selected from the following options: Gly Pro Ala Val Leu Ile Met Phe Tyr Trp His Lys Arg Gln Asn Glu Asp
  MISC_FEATURE (55)..(55): Xaa at this position is a single (one, 1) amino acid selected from the following options: Pro Ala Val Leu Ile Met Cys Tyr Trp His Lys Arg Gln Glu Asp Ser Thr
  MISC_FEATURE (56)..(56): Xaa at this position is a single (one, 1) amino acid selected from the following options: Gly Pro Ala Val Leu Ile Cys Tyr Lys Arg Gln Glu Asp Ser Thr
  MISC_FEATURE (57)..(57): Xaa at this position is a single (one, 1) amino acid selected from the following options: Gly Ala Val Leu Ile Cys Phe Tyr His Lys Arg Gln Asn Glu Asp Ser Thr
  MISC_FEATURE (58)..(58): Xaa at this position is a single (one, 1) amino acid selected from the following options: Gly Ala Val Leu Ile Met Phe Tyr His Lys Arg Gln Glu Asp Ser Thr
  MISC_FEATURE (59)..(59): Xaa at this position is a single (one, 1) amino acid selected from the following options: Gly Pro Ala Val Leu Ile Met Tyr Trp His Lys Arg Gln Asn Glu Asp Ser Thr
  MISC_FEATURE (60)..(60): Xaa at this position is a single (one, 1) amino acid selected from the following options: Gly Pro Ala Leu Ile Phe Tyr His Lys Arg Gln Asn Glu Asp Ser Thr
  MISC_FEATURE (61)..(61): Xaa at this position is a single (one, 1) amino acid selected from the following options: Gly Pro Ala Val Leu Met Cys Phe His Lys Arg Gln Glu Asp Ser Thr
  MISC_FEATURE (62)..(62): Xaa at this position is a single (one, 1) amino acid selected from the following options: Gly Pro Ala Val Leu Ile Met Phe Tyr Trp His Lys Arg Gln Glu Asp Ser Thr
  MISC_FEATURE (63)..(63): Xaa at this position is a single (one, 1) amino acid selected from the following options: Gly Ala Leu Ile Met Cys Phe His Lys Arg Gln Asn Glu Asp Ser Thr
  MISC_FEATURE (64)..(64): Xaa at this position is a single (one, 1) amino acid selected from the following options: Gly Pro Ala Val Leu Ile Cys Tyr Trp His Lys Arg Gln Asn Glu Asp Ser Thr
  MISC_FEATURE (65)..(65): Xaa at this position is a single (one, 1) amino acid selected from the following options: Gly Pro Ala Val Leu Ile Met Phe Tyr His Lys Arg Gln Asn Glu Asp Ser Thr
  MISC_FEATURE (66)..(66): Xaa at this position is a single (one, 1) amino acid selected from the following options: Gly Pro Ala Val Leu Ile Met Cys Phe Trp His Lys Arg Gln Asn Glu Asp Ser Thr
  MISC_FEATURE (67)..(67): Xaa at this position is a single (one, 1) amino acid selected from the following options: Gly Pro Ala Val Leu Ile Cys Phe Tyr His Lys Arg Gln Asn Glu Asp Ser Thr
  MISC_FEATURE (68)..(68): Xaa at this position is a single (one, 1) amino acid selected from the following options: Gly Pro Ala Val Leu Ile Met Cys Phe His Lys Arg Gln Asn Glu Asp Ser Thr
  MISC_FEATURE (69)..(69): Xaa at this position is a single (one, 1) amino acid selected from the following options: Gly Pro Ala Val Leu Ile Met Phe Tyr Trp Lys Arg Gln Asn Glu Asp Ser Thr
  MISC_FEATURE (70)..(70): Xaa at this position is a single (one, 1) amino acid selected from the following options: Gly Pro Ala Leu Ile Met Cys Phe Tyr His Lys Arg Gln Asn Glu Ser Thr
  MISC_FEATURE (71)..(71): Xaa at this position is a single (one, 1) amino acid selected from the following options: Gly Ala Val Leu Ile Met Cys Phe Lys Arg Gln Asn Glu Ser Thr
  MISC_FEATURE (72)..(72): Xaa at this position is a single (one, 1) amino acid selected from the following options: Gly Pro Ala Val Leu Ile Met Cys Tyr Trp His Lys Arg Gln Asn Glu Ser Thr
  MISC_FEATURE (73)..(73): Xaa at this position is a single (one, 1) amino acid selected from the following options: Gly Pro Ala Val Leu Met Phe Tyr Trp His Lys Arg Gln Asn Glu Asp Ser Thr
  MISC_FEATURE (74)..(74): Xaa at this position is a single (one, 1) amino acid selected from the following options: Gly Pro Ala Val Leu Ile Tyr Trp His Lys Gln Glu Asp Ser Thr
  MISC_FEATURE (75)..(75): Xaa at this position is a single (one, 1) amino acid selected from the following options: Gly Pro Ala Val Leu Ile Met Cys Phe Lys Arg Gln Glu Ser Thr
  MISC_FEATURE (76)..(76): Xaa at this position is a single (one, 1) amino acid selected from the following options: Gly Pro Ala Val Leu Ile Met Cys His Lys Arg Gln Glu Asp Ser Thr
  MISC_FEATURE (77)..(77): Xaa at this position is a single (one, 1) amino acid selected from the following options: Gly Pro Ala Val Leu Ile Met Cys Trp Lys Arg Gln Asn Glu Asp Ser Thr
  MISC_FEATURE (78)..(78): Xaa at this position is a single (one, 1) amino acid selected from the following options: Pro Ala Val Leu Ile Met Cys Phe Trp His Lys Arg Gln Glu Asp Ser Thr
  MISC_FEATURE (79)..(79): Xaa at this position is a single (one, 1) amino acid selected from the following options: Gly Pro Ala Val Leu Ile Met Cys Phe Tyr Trp His Arg Gln Asn Glu Asp Ser Thr
  MISC_FEATURE (80)..(80): Xaa at this position is a single (one, 1) amino acid selected from the following options: Gly Pro Ala Val Leu Ile Cys Phe Tyr Lys Arg Gln Asn Glu Asp Ser Thr
  MISC_FEATURE (81)..(81): Xaa at this position is a single (one, 1) amino acid selected from the following options: Gly Pro Ala Val Leu Ile Met Phe Tyr Trp His Lys Arg Gln Asn Glu Asp Ser Thr
  MISC_FEATURE (82)..(82): Xaa at this position is a single (one, 1) amino acid selected from the following options: Gly Ala Val Leu Ile Met Cys Phe Tyr Trp His Lys Arg Gln Asn Glu Asp Ser Thr
  MISC_FEATURE (83)..(83): Xaa at this position is a single (one, 1) amino acid selected from the following options: Gly Pro Ala Val Leu Ile Met Cys Phe Tyr His Lys Arg Gln Glu Asp Ser Thr
  MISC_FEATURE (84)..(84): Xaa at this position is a single (one, 1) amino acid selected from the following options: Gly Pro Ala Val Leu Ile Met Cys Phe Tyr Trp His Lys Arg Gln Asn Glu Asp Ser Thr
  MISC_FEATURE (85)..(85): Xaa at this position is a single (one, 1) amino acid selected from the following options: Gly Pro Ala Val Leu Ile Met Cys Phe Tyr Trp Lys Arg Gln Asn Glu Asp Ser Thr
  MISC_FEATURE (86)..(86): Xaa at this position is a single (one, 1) amino acid selected from the following options: Gly Pro Ala Val Leu Ile Met Cys Phe Tyr His Lys Arg Gln Asn Glu Asp Ser Thr
  MISC_FEATURE (87)..(87): Xaa at this position is a single (one, 1) amino acid selected from the following options: Gly Pro Ala Val Leu Ile Met Phe Tyr Trp His Lys Arg Gln Glu Ser Thr
  MISC_FEATURE (88)..(88): Xaa at this position is a single (one, 1) amino acid selected from the following options: Pro Ala Val Leu Ile Met Cys Phe Tyr Trp His Lys Arg Gln Asn Glu Ser
  MISC_FEATURE (89)..(89): Xaa at this position is a single (one, 1) amino acid selected from the following options: Gly Pro Ala Val Leu Ile Met Cys Phe Tyr Trp Lys Arg Gln Asn Glu Asp Ser Thr
  MISC_FEATURE (90)..(90): Xaa at this position is a single (one, 1) amino acid selected from the following options: Gly Pro Ala Val Leu Ile Met Cys Phe Tyr Trp Lys Arg Gln Asn Glu Asp Ser Thr
  MISC_FEATURE (91)..(91): Xaa at this position is a single (one, 1) amino acid selected from the following options: Gly Pro Ala Val Leu Met Cys Phe His Lys Arg Gln Glu Asp Ser Thr
  MISC_FEATURE (92)..(92): Xaa at this position is a single (one, 1) amino acid selected from the following options: Gly Pro Ala Val Leu Ile Met Cys Phe Tyr His Arg Gln Asn Glu Ser Thr
  MISC_FEATURE (93)..(93): Xaa at this position is a single (one, 1) amino acid selected from the following options: Gly Ala Val Leu Ile Met Cys Phe Tyr Trp His Lys Arg Gln Asn Glu Asp Ser Thr
  MISC_FEATURE (94)..(94): Xaa at this position is a single (one, 1) amino acid selected from the following options: Gly Pro Ala Val Leu Ile Met Cys Phe Tyr His Lys Arg Asn Glu Asp Ser Thr
  MISC_FEATURE (95)..(95): Xaa at this position is a single (one, 1) amino acid selected from the following options: Gly Pro Ala Val Leu Ile Met Cys Phe Tyr Trp His Lys Arg Gln Asn Glu Asp Ser Thr
  MISC_FEATURE (96)..(96): Xaa at this position is a single (one, 1) amino acid selected from the following options: Gly Pro Ala Val Leu Ile Met Cys Phe Tyr Trp His Lys Arg Gln Asn Glu Asp Ser Thr
  MISC_FEATURE (97)..(97): Xaa at this position is a single (one, 1) amino acid selected from the following options: Gly Pro Ala Val Leu Ile Met Cys Phe Trp His Lys Arg Gln Asn Glu Ser Thr
  MISC_FEATURE (98)..(98): Xaa at this position is a single (one, 1) amino acid selected from the following options: Gly Pro Ala Val Leu Ile Met Cys Phe Tyr Trp His Lys Arg Gln Asn Asp Ser Thr
  MISC_FEATURE (99)..(99): Xaa at this position is a single (one, 1) amino acid selected from the following options: Gly Pro Ala Val Leu Ile Met Cys Phe Tyr Trp His Lys Arg Gln Asn Glu Asp Ser Thr
  MISC_FEATURE (100)..(100): Xaa at this position is a single (one, 1) amino acid selected from the following options: Gly Pro Ala Val Leu Ile Met Phe Tyr His Lys Arg Gln Asn Glu Asp Ser Thr
  MISC_FEATURE (101)..(101): Xaa at this position is a single (one, 1) amino acid selected from the following options: Gly Pro Ala Val Leu Ile Met Cys Phe Trp Lys Arg Gln Asn Glu Asp Ser Thr
  MISC_FEATURE (102)..(102): Xaa at this position is a single (one, 1) amino acid selected from the following options: Gly Pro Ala Val Leu Ile Met Cys Phe Tyr Trp His Lys Arg Gln Asn Glu Asp Ser Thr
  MISC_FEATURE (103)..(103): Xaa at this position is a single (one, 1) amino acid selected from the following options: Gly Pro Ala Val Leu Ile Met Cys Phe Tyr Trp His Lys Arg Gln Asn Glu Asp Ser Thr
  MISC_FEATURE (104)..(104): Xaa at this position is a single (one, 1) amino acid selected from the following options: Gly Pro Ala Val Leu Ile Met Cys Phe Tyr Trp His Lys Arg Gln Asn Glu Ser Thr
  MISC_FEATURE (105)..(105): Xaa at this position is a single (one, 1) amino acid selected from the following options: Gly Pro Ala Val Leu Ile Met Cys Phe Tyr His Lys Arg Gln Asn Glu Asp Ser Thr
  MISC_FEATURE (106)..(106): Xaa at this position is a single (one, 1) amino acid selected from the following options: Gly Pro Ala Val Leu Ile Met Cys Phe Tyr Trp His Lys Arg Gln Asn Glu Asp Ser Thr
  MISC_FEATURE (107)..(107): Xaa at this position is a single (one, 1) amino acid selected from the following options: Gly Pro Ala Val Leu Ile Met Cys Phe Tyr Trp His Lys Arg Gln Asn Glu Asp Ser Thr
  MISC_FEATURE (108)..(108): Xaa at this position is a single (one, 1) amino acid selected from the following options: Gly Pro Ala Val Leu Ile Met Cys Phe Tyr His Lys Arg Gln Asn Glu Asp Ser Thr
  MISC_FEATURE (109)..(109): Xaa at this position is a single (one, 1) amino acid selected from the following options: Gly Pro Ala Val Leu Ile Met Cys Phe Tyr His Lys Arg Gln Asn Glu Asp Ser Thr
  MISC_FEATURE (110)..(110): Xaa at this position is a single (one, 1) amino acid selected from the following options: Gly Pro Ala Val Leu Ile Met Cys Phe Tyr Trp His Lys Arg Gln Asn Glu Asp Ser Thr
  MISC_FEATURE (111)..(111): Xaa at this position is a single (one, 1) amino acid selected from the following options: Gly Pro Ala Val Leu Ile Met Cys Phe Tyr Trp His Lys Arg Gln Asn Glu Asp Ser Thr
  MISC_FEATURE (112)..(112): Xaa at this position is a single (one, 1) amino acid selected from the following options: Gly Pro Ala Val Leu Ile Met Cys Phe Tyr Trp Lys Arg Gln Asn Glu Asp Ser Thr
  MISC_FEATURE (113)..(113): Xaa at this position is a single (one, 1) amino acid selected from the following options: Gly Pro Ala Val Leu Ile Met Cys Phe Tyr Trp His Lys Arg Gln Asn Glu Asp Ser Thr
  MISC_FEATURE (114)..(114): Xaa at this position is a single (one, 1) amino acid selected from the following options: Gly Pro Ala Val Leu Ile Met Cys Phe Tyr Trp His Lys Arg Gln Asn Glu Asp Ser Thr
  MISC_FEATURE (115)..(115): Xaa at this position is a single (one, 1) amino acid selected from the following options: Gly Pro Ala Val Leu Ile Met Cys Phe Tyr Trp His Lys Arg Gln Asn Glu Asp Ser Thr
  MISC_FEATURE (116)..(116): Xaa at this position is a single (one, 1) amino acid selected from the following options: Gly Pro Ala Val Leu Ile Met Cys Phe Tyr Trp His Lys Arg Gln Asn Glu Asp Ser Thr
  MISC_FEATURE (117)..(117): Xaa at this position is a single (one, 1) amino acid selected from the following options: Gly Pro Ala Val Leu Ile Met Cys Phe Tyr Trp Lys Arg Gln Asn Glu Asp Ser Thr
  MISC_FEATURE (118)..(118): Xaa at this position is a single (one, 1) amino acid selected from the following options: Gly Pro Ala Val Leu Ile Met Cys Phe Tyr Trp His Lys Arg Gln Asn Glu Asp Ser Thr
  MISC_FEATURE (119)..(119): Xaa at this position is a single (one, 1) amino acid selected from the following options: Gly Pro Ala Val Leu Ile Met Cys Phe Tyr Trp His Lys Arg Gln Asn Glu Asp Ser Thr
  MISC_FEATURE (120)..(120): Xaa at this position is a single (one, 1) amino acid selected from the following options: Gly Pro Ala Val Leu Ile Met Cys Phe Tyr His Lys Arg Gln Asn Glu Asp Ser Thr
  MISC_FEATURE (121)..(121): Xaa at this position is a single (one, 1) amino acid selected from the following options: Gly Pro Ala Val Leu Ile Met Cys Phe Tyr Trp His Lys Arg Gln Asn Glu Asp Ser Thr
  MISC_FEATURE (122)..(122): Xaa at this position is a single (one, 1) amino acid selected from the following options: Gly Pro Ala Val Leu Ile Met Cys Phe Tyr Trp His Lys Arg Gln Asn Glu Asp Ser Thr
  MISC_FEATURE (123)..(123): Xaa at this position is a single (one, 1) amino acid selected from the following options: Gly Pro Ala Val Leu Ile Met Cys Phe Tyr Trp His Lys Arg Gln Asn Glu Asp Ser Thr
  MISC_FEATURE (124)..(124): Xaa at this position is a single (one, 1) amino acid selected from the following options: Gly Pro Ala Val Leu Ile Met Cys Phe Tyr Trp Lys Arg Gln Asn Glu Asp Ser Thr
  MISC_FEATURE (125)..(125): Xaa at this position is a single (one, 1) amino acid selected from the following options: Gly Pro Ala Val Leu Ile Met Cys Phe Tyr Trp His Lys Arg Gln Asn Glu Asp Ser Thr
  MISC_FEATURE (126)..(126): Xaa at this position is a single (one, 1) amino acid selected from the following options: Gly Pro Ala Val Leu Ile Met Phe His Lys Arg Gln Asn Glu Asp Ser Thr
  MISC_FEATURE (127)..(127): Xaa at this position is a single (one, 1) amino acid selected from the following options: Gly Pro Ala Val Leu Ile Met Cys Phe Tyr Trp His Lys Arg Glu Asp Ser Thr
  MISC_FEATURE (128)..(128): Xaa at this position is a single (one, 1) amino acid selected from the following options: Gly Ala Val Leu Ile Met Cys Phe Tyr Trp His Lys Arg Gln Asn Glu Asp Ser Thr
  MISC_FEATURE (129)..(129): Xaa at this position is a single (one, 1) amino acid selected from the following options: Gly Pro Ala Val Leu Ile Met Cys Phe Tyr His Lys Arg Gln Glu Asp Ser Thr
  MISC_FEATURE (130)..(130): Xaa at this position is a single (one, 1) amino acid selected from the following options: Gly Pro Ala Val Leu Ile Met Cys Phe Tyr His Lys Arg Gln Asn Glu Asp Ser Thr
  MISC_FEATURE (131)..(131): Xaa at this position is a single (one, 1) amino acid selected from the following options: Gly Pro Ala Val Leu Ile Met Cys Phe His Lys Arg Gln Asn Glu Asp Ser Thr
  MISC_FEATURE (132)..(132): Xaa at this position is a single (one, 1) amino acid selected from the following options: Gly Pro Ala Val Leu Met Phe Tyr His Lys Arg Gln Asn Glu Asp Ser Thr
  MISC_FEATURE (133)..(133): Xaa at this position is a single (one, 1) amino acid selected from the following options: Gly Pro Ala Val Leu Ile Met Cys Phe Tyr His Lys Arg Gln Asn Glu Asp Ser Thr
  MISC_FEATURE (134)..(134): Xaa at this position is a single (one, 1) amino acid selected from the following options: Gly Pro Ala Val Leu Ile Met Cys Phe Tyr Trp His Lys Arg Gln Asn Glu Asp Ser
  MISC_FEATURE (135)..(135): Xaa at this position is a single (one, 1) amino acid selected from the following options: Gly Pro Ala Val Leu Ile Met Cys Phe Tyr Lys Arg Gln Asn Glu Asp Ser Thr
  MISC_FEATURE (136)..(136): Xaa at this position is a single (one, 1) amino acid selected from the following options: Gly Pro Ala Val Leu Ile Met Phe Tyr Trp Lys Arg Gln Asn Glu Asp Ser Thr
  MISC_FEATURE (137)..(137): Xaa at this position is a single (one, 1) amino acid selected from the following options: Gly Pro Ala Val Leu Met Cys Phe His Lys Arg Glu Asp Ser Thr
  MISC_FEATURE (138)..(138): Xaa at this position is a single (one, 1) amino acid selected from the following options: Gly Pro Ala Val Leu Ile Met Cys Phe Tyr Lys Arg Asn Glu Asp Ser Thr
  MISC_FEATURE (139)..(139): Xaa at this position is a single (one, 1) amino acid selected from the following options: Gly Pro Ala Val Leu Ile Met Phe Tyr Trp Lys Arg Gln Asn Glu Asp Ser Thr
  MISC_FEATURE (140)..(140): Xaa at this position is a single (one, 1) amino acid selected from the following options: Gly Pro Ala Val Leu Ile Met Cys Phe Tyr Trp His Lys Arg Gln Asn Glu Asp Ser Thr
  MISC_FEATURE (141)..(141): Xaa at this position is a single (one, 1) amino acid selected from the following options: Gly Pro Ala Val Leu Ile Cys Phe Tyr Trp His Lys Arg Gln Glu Asp Ser Thr
  MISC_FEATURE (142)..(142): Xaa at this position is a single (one, 1) amino acid selected from the following options: Gly Pro Ala Val Leu Ile Cys Tyr His Lys Arg Gln Asn Glu Asp Ser Thr
  MISC_FEATURE (143)..(143): Xaa at this position is a single (one, 1) amino acid selected from the following options: Gly Pro Ala Val Leu Ile Met Cys Trp His Lys Arg Gln Asn Glu Asp Ser Thr
  MISC_FEATURE (144)..(144): Xaa at this position is a single (one, 1) amino acid selected from the following options: Gly Pro Ala Val Leu Ile Met Cys Phe Tyr Trp His Lys Arg Gln Glu Asp Ser Thr
  MISC_FEATURE (145)..(145): Xaa at this position is a single (one, 1) amino acid selected from the following options: Gly Pro Ala Val Leu Ile Met Phe Tyr His Lys Arg Gln Glu Asp Ser
  MISC_FEATURE (146)..(146): Xaa at this position is a single (one, 1) amino acid selected from the following options: Gly Pro Ala Val Leu Met Phe His Lys Arg Gln Asn Glu Asp Ser Thr
  MISC_FEATURE (147)..(147): Xaa at this position is a single (one, 1) amino acid selected from the following options: Gly Pro Ala Val Leu Ile Met Phe Trp His Lys Arg Gln Asn Glu Asp Ser Thr
  MISC_FEATURE (148)..(148): Xaa at this position is a single (one, 1) amino acid selected from the following options: Gly Pro Ala Val Leu Ile Met Cys Phe His Lys Arg Gln Glu Asp Ser Thr
  MISC_FEATURE (149)..(149): Xaa at this position is a single (one, 1) amino acid selected from the following options: Gly Pro Ala Val Leu Ile Met Cys Phe Tyr Trp Lys Arg Gln Asn Glu Asp Ser Thr
  MISC_FEATURE (150)..(150): Xaa at this position is a single (one, 1) amino acid selected from the following options: Gly Ala Val Leu Met Cys Phe Trp His Lys Arg Gln Asn Glu Asp Ser
  MISC_FEATURE (151)..(151): Xaa at this position is a single (one, 1) amino acid selected from the following options: Gly Pro Ala Val Leu Ile Met Cys Phe Tyr His Lys Arg Gln Asn Glu Asp Ser Thr
  MISC_FEATURE (152)..(152): Xaa at this position is a single (one, 1) amino acid selected from the following options: Gly Pro Ala Val Leu Ile Met Cys Phe Tyr Trp His Lys Arg Gln Asn Glu Asp Ser Thr
  MISC_FEATURE (153)..(153): Xaa at this position is a single (one, 1) amino acid selected from the following options: Gly Ala Val Leu Ile Met Cys Phe Tyr His Lys Arg Gln Asn Glu Asp Ser Thr
  MISC_FEATURE (154)..(154): Xaa at this position is a single (one, 1) amino acid selected from the following options: Gly Pro Ala Val Leu Ile Met Phe His Lys Arg Gln Asn Glu Asp Ser Thr
  MISC_FEATURE (155)..(155): Xaa at this position is a single (one, 1) amino acid selected from the following options: Gly Pro Ala Val Leu Ile Met Phe His Lys Arg Gln Glu Asp Ser
  MISC_FEATURE (156)..(156): Xaa at this position is a single (one, 1) amino acid selected from the following options: Gly Pro Ala Val Leu Ile Met Cys Phe Tyr Trp His Lys Arg Gln Asn Glu Asp Ser Thr
  MISC_FEATURE (157)..(157): Xaa at this position is a single (one, 1) amino acid selected from the following options: Gly Pro Ala Val Leu Ile Met Phe Tyr Trp Lys Arg Gln Glu Ser Thr
  MISC_FEATURE (158)..(158): Xaa at this position is a single (one, 1) amino acid selected from the following options: Gly Ala Val Leu Met Cys Phe Tyr His Lys Arg Gln Glu Asp Ser Thr
  MISC_FEATURE (159)..(159): Xaa at this position is a single (one, 1) amino acid selected from the following options: Gly Pro Ala Leu Ile Met Cys Phe Tyr His Lys Arg Gln Asn Glu Asp Ser Thr
  MISC_FEATURE (160)..(160): Xaa at this position is a single (one, 1) amino acid selected from the following options: Gly Pro Ala Val Leu Ile Met Cys Phe Tyr His Lys Arg Gln Asn Glu Asp Ser Thr
  MISC_FEATURE (161)..(161): Xaa at this position is a single (one, 1) amino acid selected from the following options: Gly Ala Val Leu Ile Met Cys Phe Tyr His Lys Arg Gln Glu Asp Ser Thr
  MISC_FEATURE (162)..(162): Xaa at this position is a single (one, 1) amino acid selected from the following options: Gly Ala Val Leu Ile Met Cys Phe Tyr His Lys Arg Gln Glu Asp Ser Thr
  MISC_FEATURE (163)..(163): Xaa at this position is a single (one, 1) amino acid selected from the following options: Gly Pro Ala Leu Ile Met Cys Phe His Lys Arg Gln Asn Glu Asp Ser Thr
  MISC_FEATURE (164)..(164): Xaa at this position is a single (one, 1) amino acid selected from the following options: Gly Ala Val Leu Ile Met Tyr His Lys Arg Gln Asn Glu Asp Ser Thr
  MISC_FEATURE (165)..(165): Xaa at this position is a single (one, 1) amino acid selected from the following options: Gly Pro Ala Val Leu Ile Met Phe Tyr Trp His Lys Arg Gln Glu Asp Ser
  MISC_FEATURE (166)..(166): Xaa at this position is a single (one, 1) amino acid selected from the following options: Gly Ala Val Leu Met Cys Phe His Lys Arg Gln Glu Asp Ser Thr
  MISC_FEATURE (167)..(167): Xaa at this position is a single (one, 1) amino acid selected from the following options: Gly Pro Ala Val Leu Ile Cys Phe Tyr His Lys Arg Gln Asn Glu Asp Ser Thr
  MISC_FEATURE (168)..(168): Xaa at this position is a single (one, 1) amino acid selected from the following options: Gly Pro Ala Val Leu Ile Met Cys Phe Tyr His Lys Arg Gln Asn Glu Ser Thr
  MISC_FEATURE (169)..(169): Xaa at this position is a single (one, 1) amino acid selected from the following options: Gly Pro Ala Val Leu Ile Met Cys Tyr Lys Arg Gln Asn Glu Asp Ser Thr
  MISC_FEATURE (170)..(170): Xaa at this position is a single (one, 1) amino acid selected from the following options: Gly Ala Val Leu Ile Met Tyr His Lys Arg Gln Asn Glu Asp Ser Thr
  MISC_FEATURE (171)..(171): Xaa at this position is a single (one, 1) amino acid selected from the following options: Pro Ala Leu Ile Met Phe Tyr His Lys Arg Gln Asn Glu Asp Ser Thr
  MISC_FEATURE (172)..(172): Xaa at this position is a single (one, 1) amino acid selected from the following options: Gly Pro Ala Val Leu Ile Met Phe His Lys Arg Gln Asn Glu Asp Thr
  MISC_FEATURE (173)..(173): Xaa at this position is a single (one, 1) amino acid selected from the following options: Gly Pro Ala Val Leu Tyr His Lys Arg Gln Asn Glu Asp Ser Thr
  MISC_FEATURE (174)..(174): Xaa at this position is a single (one, 1) amino acid selected from the following options: Gly Pro Ala Val Leu Ile Met Cys Phe Tyr Trp His Lys Arg Gln Asn Glu Asp Ser Thr
  MISC_FEATURE (175)..(175): Xaa at this position is a single (one, 1) amino acid selected from the following options: Gly Pro Ala Val Leu Ile Met Cys Phe Tyr Trp His Lys Arg Gln Asn Glu Asp Ser Thr
  MISC_FEATURE (176)..(176): Xaa at this position is a single (one, 1) amino acid selected from the following options: Gly Pro Ala Val Leu Ile Met Phe Tyr His Lys Arg Gln Asn Glu Asp Ser Thr
  MISC_FEATURE (177)..(177): Xaa at this position is a single (one, 1) amino acid selected from the following options: Gly Pro Ala Leu Ile Met Tyr Lys Arg Gln Asn Glu Asp Ser Thr
  MISC_FEATURE (178)..(178): Xaa at this position is a single (one, 1) amino acid selected from the following options: Gly Pro Ala Val Leu Ile Phe His Lys Arg Gln Asn Glu Asp Ser
  MISC_FEATURE (179)..(179): Xaa at this position is a single (one, 1) amino acid selected from the following options: Ala Val Leu Ile Met Phe Tyr His Lys Arg Glu Asp Ser Thr
  MISC_FEATURE (180)..(180): Xaa at this position is a single (one, 1) amino acid selected from the following options: Gly Pro Ala Val Leu Ile Met Cys Phe Tyr His Lys Arg Gln Asn Glu Asp Ser Thr
  MISC_FEATURE (181)..(181): Xaa at this position is a single (one, 1) amino acid selected from the following options: Gly Pro Ala Val Leu Ile Met Cys Phe Tyr Trp His Lys Arg Gln Asn Glu Asp Ser Thr
  MISC_FEATURE (182)..(182): Xaa at this position is a single (one, 1) amino acid selected from the following options: Gly Pro Ala Val Leu Ile Met Cys Phe Tyr Trp His Lys Arg Gln Asn Glu Asp Ser Thr
  MISC_FEATURE (183)..(183): Xaa at this position is a single (one, 1) amino acid selected from the following options: Pro Ala Val Leu Ile Met Tyr His Lys Arg Gln Asn Glu Asp Ser Thr
  MISC_FEATURE (184)..(184): Xaa at this position is a single (one, 1) amino acid selected from the following options: Gly Pro Ala Val Leu Ile Met His Lys Arg Gln Asn Glu Asp Ser Thr
  MISC_FEATURE (185)..(185): Xaa at this position is a single (one, 1) amino acid selected from the following options: Gly Pro Ala Val Leu Ile Met Phe Trp His Lys Arg Gln Asn Glu Asp Ser Thr
  MISC_FEATURE (186)..(186): Xaa at this position is a single (one, 1) amino acid selected from the following options: Gly Ala Val Leu Ile Met Cys Phe His Lys Arg Gln Glu Asp Thr
  MISC_FEATURE (187)..(187): Xaa at this position is a single (one, 1) amino acid selected from the following options: Gly Pro Ala Val Leu Ile Met Cys Phe Trp His Lys Arg Gln Asn Glu Asp Ser Thr
  MISC_FEATURE (188)..(188): Xaa at this position is a single (one, 1) amino acid selected from the following options: Gly Pro Ala Leu Ile Cys Tyr His Lys Arg Gln Asn Glu Asp Thr
  MISC_FEATURE (189)..(189): Xaa at this position is a single (one, 1) amino acid selected from the following options: Gly Pro Ala Val Leu Ile Met Phe Tyr His Lys Arg Gln Asn Glu Asp Thr
  MISC_FEATURE (190)..(190): Xaa at this position is a single (one, 1) amino acid selected from the following options: Gly Pro Ala Val Leu Ile Met Cys His Lys Arg Gln Asn Glu Asp Ser Thr
  MISC_FEATURE (191)..(191): Xaa at this position is a single (one, 1) amino acid selected from the following options: Gly Pro Ala Val Leu Ile Met Phe Trp His Lys Arg Gln Asn Glu Asp Ser Thr
  MISC_FEATURE (192)..(192): Xaa at this position is a single (one, 1) amino acid selected from the following options: Gly Ala Val Leu Ile Phe Tyr Trp His Lys Arg Gln Asn Glu Asp Ser Thr
  MISC_FEATURE (193)..(193): Xaa at this position is a single (one, 1) amino acid selected from the following options: Pro Ala Val Leu Ile Met Phe His Lys Arg Gln Asn Glu Asp Ser Thr
  MISC_FEATURE (194)..(194): Xaa at this position is a single (one, 1) amino acid selected from the following options: Gly Pro Ala Val Leu Ile Cys Phe His Lys Arg Gln Asn Glu Asp Ser Thr
  MISC_FEATURE (195)..(195): Xaa at this position is a single (one, 1) amino acid selected from the following options: Gly Pro Ala Val Leu Ile Cys Phe Tyr Trp His Lys Arg Gln Asn Glu Asp Ser Thr
  MISC_FEATURE (196)..(196): Xaa at this position is a single (one, 1) amino acid selected from the following options: Pro Ala Val Leu Ile Met Phe Tyr His Lys Arg Gln Asn Glu Asp Ser Thr
  MISC_FEATURE (197)..(197): Xaa at this position is a single (one, 1) amino acid selected from the following options: Gly Pro Ala Val Leu Ile Met Cys Phe Tyr Trp His Lys Arg Gln Asn Glu Asp Ser Thr
  MISC_FEATURE (198)..(198): Xaa at this position is a single (one, 1) amino acid selected from the following options: Gly Pro Ala Leu Ile Phe Tyr His Lys Arg Gln Asn Glu Asp Ser Thr
  MISC_FEATURE (199)..(199): Xaa at this position is a single (one, 1) amino acid selected from the following options: Gly Pro Ala Val Leu Ile Met Cys Tyr Trp His Lys Arg Gln Asn Glu Asp Ser Thr
  MISC_FEATURE (200)..(200): Xaa at this position is a single (one, 1) amino acid selected from the following options: Gly Pro Ala Val Leu Ile Met Tyr Trp His Lys Gln Asn Glu Asp Ser Thr
  MISC_FEATURE (201)..(201): Xaa at this position is a single (one, 1) amino acid selected from the following options: Gly Pro Ala Val Leu Ile Cys Phe Tyr Lys Arg Gln Asn Glu Asp Ser Thr
  MISC_FEATURE (202)..(202): Xaa at this position is a single (one, 1) amino acid selected from the following options: Gly Pro Ala Val Leu Ile Met Phe Tyr Trp His Lys Arg Gln Asn Glu Asp Ser Thr
  MISC_FEATURE (203)..(203): Xaa at this position is a single (one, 1) amino acid selected from the following options: Gly Pro Ala Val Leu Ile Met Phe Tyr His Lys Arg Gln Asn Glu Asp Ser Thr
  MISC_FEATURE (204)..(204): Xaa at this position is a single (one, 1) amino acid selected from the following options: Gly Ala Val Leu Ile Met His Lys Arg Gln Asn Glu Asp Ser Thr
  MISC_FEATURE (205)..(205): Xaa at this position is a single (one, 1) amino acid selected from the following options: Gly Pro Ala Val Leu Ile Met Cys Phe Tyr Trp His Lys Arg Gln Asn Glu Asp Ser Thr
  MISC_FEATURE (206)..(206): Xaa at this position is a single (one, 1) amino acid selected from the following options: Gly Pro Ala Val Leu Ile Phe Tyr Trp His Lys Arg Gln Asn Glu Asp Ser Thr
  MISC_FEATURE (207)..(207): Xaa at this position is a single (one, 1) amino acid selected from the following options: Gly Pro Ala Leu Ile Cys His Lys Arg Gln Asn Glu Asp Ser Thr
  MISC_FEATURE (208)..(208): Xaa at this position is a single (one, 1) amino acid selected from the following options: Gly Pro Ala Val Leu Ile Met Cys Phe Tyr Trp His Lys Arg Gln Glu Asp Ser Thr
  MISC_FEATURE (209)..(209): Xaa at this position is a single (one, 1) amino acid selected from the following options: Gly Ala Val Ile Cys Phe Tyr His Lys Arg Gln Asn Glu Asp Ser Thr
  MISC_FEATURE (210)..(210): Xaa at this position is a single (one, 1) amino acid selected from the following options: Gly Ala Val Leu Ile Phe Tyr His Lys Arg Gln Asn Glu Asp Ser Thr
  MISC_FEATURE (211)..(211): Xaa at this position is a single (one, 1) amino acid selected from the following options: Gly Pro Ala Val Leu Ile Cys Phe His Lys Arg Gln Asn Glu Asp Ser Thr
  MISC_FEATURE (212)..(212): Xaa at this position is a single (one, 1) amino acid selected from the following options: Gly Pro Ala Val Leu Ile Met Cys Phe His Lys Arg Gln Glu Asp Ser Thr
  MISC_FEATURE (213)..(213): Xaa at this position is a single (one, 1) amino acid selected from the following options: Gly Pro Ala Val Leu Ile Met Phe Tyr His Lys Arg Gln Asn Glu Asp Ser Thr
  MISC_FEATURE (214)..(214): Xaa at this position is a single (one, 1) amino acid selected from the following options: Gly Pro Ala Val Leu Ile Met Phe Lys Arg Gln Asn Glu Asp Ser Thr
  MISC_FEATURE (215)..(215): Xaa at this position is a single (one, 1) amino acid selected from the following options: Pro Ala Val Leu Ile Met Cys Trp Lys Arg Gln Asn Glu Asp Ser Thr
  MISC_FEATURE (216)..(216): Xaa at this position is a single (one, 1) amino acid selected from the following options: Gly Pro Ala Val Leu Ile Met Cys Tyr His Lys Arg Gln Asn Glu Asp Ser Thr
  MISC_FEATURE (217)..(217): Xaa at this position is a single (one, 1) amino acid selected from the following options: Pro Ala Leu Ile Phe Trp His Lys Arg Gln Asn Glu Ser Thr
  MISC_FEATURE (218)..(218): Xaa at this position is a single (one, 1) amino acid selected from the following options: Gly Pro Val Leu Ile Phe His Lys Arg Gln Asn Glu Asp Ser Thr
  MISC_FEATURE (219)..(219): Xaa at this position is a single (one, 1) amino acid selected from the following options: Gly Pro Ala Val Leu Ile Met Phe Tyr His Lys Arg Gln Asn Glu Asp Ser Thr
  MISC_FEATURE (220)..(220): Xaa at this position is a single (one, 1) amino acid selected from the following options: Gly Pro Ala Val Leu Ile Cys Phe His Lys Arg Gln Asn Glu Asp Thr
XXXXXXXXXXXXXXXXXXXXXXXXXXXXXXXXXXXXXXXXXXXXXXXXXXXXXXXXXXXXXXXXXXXXXXXXXXXXXXXXXXXXXXXXXXXXXXXXXXXXXXXXXXXXXXXXXXXXXXXXXXXXXXXXXXXXXXXXXXXXXXXXXXXXXXXXXXXXXXXXXXXXXXXXXXXXXXXXXXXXXXXXXXXXXXXXXXXXXXXXXXXXXXXXXXXXXXXXXXXX

SEQ ID NO: 3 - protein, 114 aa, Artificial Sequence
  Designed; as detailed elsewhere in present application
  MISC_FEATURE (1)..(1): Xaa at this position is a single (one, 1) amino acid selected from the following options: Gly Pro Ala Val Leu Ile Met Cys Phe Tyr Trp His Lys Arg Gln Asn Glu Asp Ser Thr
  MISC_FEATURE (2)..(2): Xaa at this position is a single (one, 1) amino acid selected from the following options: Gly Pro Ala Val Leu Ile Met Cys Phe Tyr Trp His Lys Arg Gln Asn Glu Asp Ser Thr
  MISC_FEATURE (3)..(3): Xaa at this position is a single (one, 1) amino acid selected from the following options: Gly Pro Ala Val Leu Ile Met Cys Phe Tyr Trp His Lys Arg Gln Asn Glu Ser Thr
  MISC_FEATURE (4)..(4): Xaa at this position is a single (one, 1) amino acid selected from the following options: Gly Pro Ala Val Leu Ile Met Cys Phe Tyr His Lys Arg Gln Asn Glu Asp Ser Thr
  MISC_FEATURE (5)..(5): Xaa at this position is a single (one, 1) amino acid selected from the following options: Gly Pro Ala Val Leu Ile Met Cys Phe Tyr Trp His Lys Arg Gln Asn Glu Asp Ser Thr
  MISC_FEATURE (6)..(6): Xaa at this position is a single (one, 1) amino acid selected from the following options: Gly Pro Ala Val Leu Ile Met Cys Phe Tyr Trp His Lys Arg Gln Asn Glu Asp Ser Thr
  MISC_FEATURE (7)..(7): Xaa at this position is a single (one, 1) amino acid selected from the following options: Gly Pro Ala Val Leu Ile Met Cys Phe Tyr His Lys Arg Gln Asn Glu Asp Ser Thr
  MISC_FEATURE (8)..(8): Xaa at this position is a single (one, 1) amino acid selected from the following options: Gly Pro Ala Val Leu Ile Met Cys Phe Tyr His Lys Arg Gln Asn Glu Asp Ser Thr
  MISC_FEATURE (9)..(9): Xaa at this position is a single (one, 1) amino acid selected from the following options: Gly Pro Ala Val Leu Ile Met Cys Phe Tyr Trp His Lys Arg Gln Asn Glu Asp Ser Thr
  MISC_FEATURE (10)..(10): Xaa at this position is a single (one, 1) amino acid selected from the following options: Gly Pro Ala Val Leu Ile Met Cys Phe Tyr Trp His Lys Arg Gln Asn Glu Asp Ser Thr
  MISC_FEATURE (11)..(11): Xaa at this position is a single (one, 1) amino acid selected from the following options: Gly Pro Ala Val Leu Ile Met Cys Phe Tyr Trp Lys Arg Gln Asn Glu Asp Ser Thr
  MISC_FEATURE (12)..(12): Xaa at this position is a single (one, 1) amino acid selected from the following options: Gly Pro Ala Val Leu Ile Met Cys Phe Tyr Trp His Lys Arg Gln Asn Glu Asp Ser Thr
  MISC_FEATURE (13)..(13): Xaa at this position is a single (one, 1) amino acid selected from the following options: Gly Pro Ala Val Leu Ile Met Cys Phe Tyr Trp His Lys Arg Gln Asn Glu Asp Ser Thr
  MISC_FEATURE (14)..(14): Xaa at this position is a single (one, 1) amino acid selected from the following options: Gly Pro Ala Val Leu Ile Met Cys Phe Tyr Trp His Lys Arg Gln Asn Glu Asp Ser Thr
  MISC_FEATURE (15)..(15): Xaa at this position is a single (one, 1) amino acid selected from the following options: Gly Pro Ala Val Leu Ile Met Cys Phe Tyr Trp His Lys Arg Gln Asn Glu Asp Ser Thr
  MISC_FEATURE (16)..(16): Xaa at this position is a single (one, 1) amino acid selected from the following options: Gly Pro Ala Val Leu Ile Met Cys Phe Tyr Trp Lys Arg Gln Asn Glu Asp Ser Thr
  MISC_FEATURE (17)..(17): Xaa at this position is a single (one, 1) amino acid selected from the following options: Gly Pro Ala Val Leu Ile Met Cys Phe Tyr Trp His Lys Arg Gln Asn Glu Asp Ser Thr
  MISC_FEATURE (18)..(18): Xaa at this position is a single (one, 1) amino acid selected from the following options: Gly Pro Ala Val Leu Ile Met Cys Phe Tyr Trp His Lys Arg Gln Asn Glu Asp Ser Thr
  MISC_FEATURE (19)..(19): Xaa at this position is a single (one, 1) amino acid selected from the following options: Gly Pro Ala Val Leu Ile Met Cys Phe Tyr His Lys Arg Gln Asn Glu Asp Ser Thr
  MISC_FEATURE (20)..(20): Xaa at this position is a single (one, 1) amino acid selected from the following options: Gly Pro Ala Val Leu Ile Met Cys Phe Tyr Trp His Lys Arg Gln Asn Glu Asp Ser Thr
  MISC_FEATURE (21)..(21): Xaa at this position is a single (one, 1) amino acid selected from the following options: Gly Pro Ala Val Leu Ile Met Cys Phe Tyr Trp His Lys Arg Gln Asn Glu Asp Ser Thr
  MISC_FEATURE (22)..(22): Xaa at this position is a single (one, 1) amino acid selected from the following options: Gly Pro Ala Val Leu Ile Met Cys Phe Tyr Trp His Lys Arg Gln Asn Glu Asp Ser Thr
  MISC_FEATURE (23)..(23): Xaa at this position is a single (one, 1) amino acid selected from the following options: Gly Pro Ala Val Leu Ile Met Cys Phe Tyr Trp Lys Arg Gln Asn Glu Asp Ser Thr
  MISC_FEATURE (24)..(24): Xaa at this position is a single (one, 1) amino acid selected from the following options: Gly Pro Ala Val Leu Ile Met Cys Phe Tyr Trp His Lys Arg Gln Asn Glu Asp Ser Thr
  MISC_FEATURE (25)..(25): Xaa at this position is a single (one, 1) amino acid selected from the following options: Gly Pro Ala Val Leu Ile Met Phe His Lys Arg Gln Asn Glu Asp Ser Thr
  MISC_FEATURE (26)..(26): Xaa at this position is a single (one, 1) amino acid selected from the following options: Gly Pro Ala Val Leu Ile Met Cys Phe Tyr Trp His Lys Arg Glu Asp Ser Thr
  MISC_FEATURE (27)..(27): Xaa at this position is a single (one, 1) amino acid selected from the following options: Gly Ala Val Leu Ile Met Cys Phe Tyr Trp His Lys Arg Gln Asn Glu Asp Ser Thr
  MISC_FEATURE (28)..(28): Xaa at this position is a single (one, 1) amino acid selected from the following options: Gly Pro Ala Val Leu Ile Met Cys Phe Tyr His Lys Arg Gln Glu Asp Ser Thr
  MISC_FEATURE (29)..(29): Xaa at this position is a single (one, 1) amino acid selected from the following options: Gly Pro Ala Val Leu Ile Met Cys Phe Tyr His Lys Arg Gln Asn Glu Asp Ser Thr
  MISC_FEATURE (30)..(30): Xaa at this position is a single (one, 1) amino acid selected from the following options: Gly Pro Ala Val Leu Ile Met Cys Phe His Lys Arg Gln Asn Glu Asp Ser Thr
  MISC_FEATURE (31)..(31): Xaa at this position is a single (one, 1) amino acid selected from the following options: Gly Pro Ala Val Leu Met Phe Tyr His Lys Arg Gln Asn Glu Asp Ser Thr
  MISC_FEATURE (32)..(32): Xaa at this position is a single (one, 1) amino acid selected from the following options: Gly Pro Ala Val Leu Ile Met Cys Phe Tyr His Lys Arg Gln Asn Glu Asp Ser Thr
  MISC_FEATURE (33)..(33): Xaa at this position is a single (one, 1) amino acid selected from the following options: Gly Pro Ala Val Leu Ile Met Cys Phe Tyr Trp His Lys Arg Gln Asn Glu Asp Ser
  MISC_FEATURE (34)..(34): Xaa at this position is a single (one, 1) amino acid selected from the following options: Gly Pro Ala Val Leu Ile Met Cys Phe Tyr Lys Arg Gln Asn Glu Asp Ser Thr
  MISC_FEATURE (35)..(35): Xaa at this position is a single (one, 1) amino acid selected from the following options: Gly Pro Ala Val Leu Ile Met Phe Tyr Trp Lys Arg Gln Asn Glu Asp Ser Thr
  MISC_FEATURE (36)..(36): Xaa at this position is a single (one, 1) amino acid selected from the following options: Gly Pro Ala Val Leu Met Cys Phe His Lys Arg Glu Asp Ser Thr
  MISC_FEATURE (37)..(37): Xaa at this position is a single (one, 1) amino acid selected from the following options: Gly Pro Ala Val Leu Ile Met Cys Phe Tyr Lys Arg Asn Glu Asp Ser Thr
  MISC_FEATURE (38)..(38): Xaa at this position is a single (one, 1) amino acid selected from the following options: Gly Pro Ala Val Leu Ile Met Phe Tyr Trp Lys Arg Gln Asn Glu Asp Ser Thr
  MISC_FEATURE (39)..(39): Xaa at this position is a single (one, 1) amino acid selected from the following options: Gly Pro Ala Val Leu Ile Met Cys Phe Tyr Trp His Lys Arg Gln Asn Glu Asp Ser Thr
  MISC_FEATURE (40)..(40): Xaa at this position is a single (one, 1) amino acid selected from the following options: Gly Pro Ala Val Leu Ile Cys Phe Tyr Trp His Lys Arg Gln Glu Asp Ser Thr
  MISC_FEATURE (41)..(41): Xaa at this position is a single (one, 1) amino acid selected from the following options: Gly Pro Ala Val Leu Ile Cys Tyr His Lys Arg Gln Asn Glu Asp Ser Thr
  MISC_FEATURE (42)..(42): Xaa at this position is a single (one, 1) amino acid selected from the following options: Gly Pro Ala Val Leu Ile Met Cys Trp His Lys Arg Gln Asn Glu Asp Ser Thr
  MISC_FEATURE (43)..(43): Xaa at this position is a single (one, 1) amino acid selected from the following options: Gly Pro Ala Val Leu Ile Met Cys Phe Tyr Trp His Lys Arg Gln Glu Asp Ser Thr
  MISC_FEATURE (44)..(44): Xaa at this position is a single (one, 1) amino acid selected from the following options: Gly Pro Ala Val Leu Ile Met Phe Tyr His Lys Arg Gln Glu Asp Ser
  MISC_FEATURE (45)..(45): Xaa at this position is a single (one, 1) amino acid selected from the following options: Gly Pro Ala Val Leu Met Phe His Lys Arg Gln Asn Glu Asp Ser Thr
  MISC_FEATURE (46)..(46): Xaa at this position is a single (one, 1) amino acid selected from the following options: Gly Pro Ala Val Leu Ile Met Phe Trp His Lys Arg Gln Asn Glu Asp Ser Thr
  MISC_FEATURE (47)..(47): Xaa at this position is a single (one, 1) amino acid selected from the following options: Gly Pro Ala Val Leu Ile Met Cys Phe His Lys Arg Gln Glu Asp Ser Thr
  MISC_FEATURE (48)..(48): Xaa at this position is a single (one, 1) amino acid selected from the following options: Gly Pro Ala Val Leu Ile Met Cys Phe Tyr Trp Lys Arg Gln Asn Glu Asp Ser Thr
  MISC_FEATURE (49)..(49): Xaa at this position is a single (one, 1) amino acid selected from the following options: Gly Ala Val Leu Met Cys Phe Trp His Lys Arg Gln Asn Glu Asp Ser
  MISC_FEATURE (50)..(50): Xaa at this position is a single (one, 1) amino acid selected from the following options: Gly Pro Ala Val Leu Ile Met Cys Phe Tyr His Lys Arg Gln Asn Glu Asp Ser Thr
  MISC_FEATURE (51)..(51): Xaa at this position is a single (one, 1) amino acid selected from the following options: Gly Pro Ala Val Leu Ile Met Cys Phe Tyr Trp His Lys Arg Gln Asn Glu Asp Ser Thr
  MISC_FEATURE (52)..(52): Xaa at this position is a single (one, 1) amino acid selected from the following options: Gly Ala Val Leu Ile Met Cys Phe Tyr His Lys Arg Gln Asn Glu Asp Ser Thr
  MISC_FEATURE (53)..(53): Xaa at this position is a single (one, 1) amino acid selected from the following options: Gly Pro Ala Val Leu Ile Met Phe His Lys Arg Gln Asn Glu Asp Ser Thr
  MISC_FEATURE (54)..(54): Xaa at this position is a single (one, 1) amino acid selected from the following options: Gly Pro Ala Val Leu Ile Met Phe His Lys Arg Gln Glu Asp Ser
  MISC_FEATURE (55)..(55): Xaa at this position is a single (one, 1) amino acid selected from the following options: Gly Pro Ala Val Leu Ile Met Cys Phe Tyr Trp His Lys Arg Gln Asn Glu Asp Ser Thr
  MISC_FEATURE (56)..(56): Xaa at this position is a single (one, 1) amino acid selected from the following options: Gly Pro Ala Val Leu Ile Met Phe Tyr Trp Lys Arg Gln Glu Ser Thr
  MISC_FEATURE (57)..(57): Xaa at this position is a single (one, 1) amino acid selected from the following options: Gly Ala Val Leu Met Cys Phe Tyr His Lys Arg Gln Glu Asp Ser Thr
  MISC_FEATURE (58)..(58): Xaa at this position is a single (one, 1) amino acid selected from the following options: Gly Pro Ala Leu Ile Met Cys Phe Tyr His Lys Arg Gln Asn Glu Asp Ser Thr
  MISC_FEATURE (59)..(59): Xaa at this position is a single (one, 1) amino acid selected from the following options: Gly Pro Ala Val Leu Ile Met Cys Phe Tyr His Lys Arg Gln Asn Glu Asp Ser Thr
  MISC_FEATURE (60)..(60): Xaa at this position is a single (one, 1) amino acid selected from the following options: Gly Ala Val Leu Ile Met Cys Phe Tyr His Lys Arg Gln Glu Asp Ser Thr
  MISC_FEATURE (61)..(61): Xaa at this position is a single (one, 1) amino acid selected from the following options: Gly Ala Val Leu Ile Met Cys Phe Tyr His Lys Arg Gln Glu Asp Ser Thr
  MISC_FEATURE (62)..(62): Xaa at this position is a single (one, 1) amino acid selected from the following options: Gly Pro Ala Leu Ile Met Cys Phe His Lys Arg Gln Asn Glu Asp Ser Thr
  MISC_FEATURE (63)..(63): Xaa at this position is a single (one, 1) amino acid selected from the following options: Gly Ala Val Leu Ile Met Tyr His Lys Arg Gln Asn Glu Asp Ser Thr
  MISC_FEATURE (64)..(64): Xaa at this position is a single (one, 1) amino acid selected from the following options: Gly Pro Ala Val Leu Ile Met Phe Tyr Trp His Lys Arg Gln Glu Asp Ser
  MISC_FEATURE (65)..(65): Xaa at this position is a single (one, 1) amino acid selected from the following options: Gly Ala Val Leu Met Cys Phe His Lys Arg Gln Glu Asp Ser Thr
  MISC_FEATURE (66)..(66): Xaa at this position is a single (one, 1) amino acid selected from the following options: Gly Pro Ala Val Leu Ile Cys Phe Tyr His Lys Arg Gln Asn Glu Asp Ser Thr
  MISC_FEATURE (67)..(67): Xaa at this position is a single (one, 1) amino acid selected from the following options: Gly Pro Ala Val Leu Ile Met Cys Phe Tyr His Lys Arg Gln Asn Glu Ser Thr
  MISC_FEATURE (68)..(68): Xaa at this position is a single (one, 1) amino acid selected from the following options: Gly Pro Ala Val Leu Ile Met Cys Tyr Lys Arg Gln Asn Glu Asp Ser Thr
  MISC_FEATURE (69)..(69): Xaa at this position is a single (one, 1) amino acid selected from the following options: Gly Ala Val Leu Ile Met Tyr His Lys Arg Gln Asn Glu Asp Ser Thr
  MISC_FEATURE (70)..(70): Xaa at this position is a single (one, 1) amino acid selected from the following options: Pro Ala Leu Ile Met Phe Tyr His Lys Arg Gln Asn Glu Asp Ser Thr
  MISC_FEATURE (71)..(71): Xaa at this position is a single (one, 1) amino acid selected from the following options: Gly Pro Ala Val Leu Ile Met Phe His Lys Arg Gln Asn Glu Asp Thr
  MISC_FEATURE (72)..(72): Xaa at this position is a single (one, 1) amino acid selected from the following options: Gly Pro Ala Val Leu Tyr His Lys Arg Gln Asn Glu Asp Ser Thr
  MISC_FEATURE (73)..(73): Xaa at this position is a single (one, 1) amino acid selected from the following options: Gly Pro Ala Val Leu Ile Met Cys Phe Tyr Trp His Lys Arg Gln Asn Glu Asp Ser Thr
  MISC_FEATURE (74)..(74): Xaa at this position is a single (one, 1) amino acid selected from the following options: Gly Pro Ala Val Leu Ile Met Cys Phe Tyr Trp His Lys Arg Gln Asn Glu Asp Ser Thr
  MISC_FEATURE (75)..(75): Xaa at this position is a single (one, 1) amino acid selected from the following options: Gly Pro Ala Val Leu Ile Met Phe Tyr His Lys Arg Gln Asn Glu Asp Ser Thr
  MISC_FEATURE (76)..(76): Xaa at this position is a single (one, 1) amino acid selected from the following options: Gly Pro Ala Leu Ile Met Tyr Lys Arg Gln Asn Glu Asp Ser Thr
  MISC_FEATURE (77)..(77): Xaa at this position is a single (one, 1) amino acid selected from the following options: Gly Pro Ala Val Leu Ile Phe His Lys Arg Gln Asn Glu Asp Ser
  MISC_FEATURE (78)..(78): Xaa at this position is a single (one, 1) amino acid selected from the following options: Ala Val Leu Ile Met Phe Tyr His Lys Arg Glu Asp Ser Thr
  MISC_FEATURE (79)..(79): Xaa at this position is a single (one, 1) amino acid selected from the following options: Gly Pro Ala Val Leu Ile Met Cys Phe Tyr His Lys Arg Gln Asn Glu Asp Ser Thr
  MISC_FEATURE (80)..(80): Xaa at this position is a single (one, 1) amino acid selected from the following options: Gly Pro Ala Val Leu Ile Met Cys Phe Tyr Trp His Lys Arg Gln Asn Glu Asp Ser Thr
  MISC_FEATURE (81)..(81): Xaa at this position is a single (one, 1) amino acid selected from the following options: Gly Pro Ala Val Leu Ile Met Cys Phe Tyr Trp His Lys Arg Gln Asn Glu Asp Ser Thr
  MISC_FEATURE (82)..(82): Xaa at this position is a single (one, 1) amino acid selected from the following options: Pro Ala Val Leu Ile Met Tyr His Lys Arg Gln Asn Glu Asp Ser Thr
  MISC_FEATURE (83)..(83): Xaa at this position is a single (one, 1) amino acid selected from the following options: Gly Pro Ala Val Leu Ile Met His Lys Arg Gln Asn Glu Asp Ser Thr
  MISC_FEATURE (84)..(84): Xaa at this position is a single (one, 1) amino acid selected from the following options: Gly Pro Ala Val Leu Ile Met Phe Trp His Lys Arg Gln Asn Glu Asp Ser Thr
  MISC_FEATURE (85)..(85): Xaa at this position is a single (one, 1) amino acid selected from the following options: Gly Ala Val Leu Ile Met Cys Phe His Lys Arg Gln Glu Asp Thr
  MISC_FEATURE (86)..(86): Xaa at this position is a single (one, 1) amino acid selected from the following options: Gly Pro Ala Val Leu Ile Met Cys Phe Trp His Lys Arg Gln Asn Glu Asp Ser Thr
  MISC_FEATURE (87)..(87): Xaa at this position is a single (one, 1) amino acid selected from the following options: Gly Pro Ala Leu Ile Cys Tyr His Lys Arg Gln Asn Glu Asp Thr
  MISC_FEATURE (88)..(88): Xaa at this position is a single (one, 1) amino acid selected from the following options: Gly Pro Ala Val Leu Ile Met Phe Tyr His Lys Arg Gln Asn Glu Asp Thr
  MISC_FEATURE (89)..(89): Xaa at this position is a single (one, 1) amino acid selected from the following options: Gly Pro Ala Val Leu Ile Met Cys His Lys Arg Gln Asn Glu Asp Ser Thr
  MISC_FEATURE (90)..(90): Xaa at this position is a single (one, 1) amino acid selected from the following options: Gly Pro Ala Val Leu Ile Met Phe Trp His Lys Arg Gln Asn Glu Asp Ser Thr
  MISC_FEATURE (91)..(91): Xaa at this position is a single (one, 1) amino acid selected from the following options: Gly Ala Val Leu Ile Phe Tyr Trp His Lys Arg Gln Asn Glu Asp Ser Thr
  MISC_FEATURE (92)..(92): Xaa at this position is a single (one, 1) amino acid selected from the following options: Pro Ala Val Leu Ile Met Phe His Lys Arg Gln Asn Glu Asp Ser Thr
  MISC_FEATURE (93)..(93): Xaa at this position is a single (one, 1) amino acid selected from the following options: Gly Pro Ala Val Leu Ile Cys Phe His Lys Arg Gln Asn Glu Asp Ser Thr
  MISC_FEATURE (94)..(94): Xaa at this position is a single (one, 1) amino acid selected from the following options: Gly Pro Ala Val Leu Ile Cys Phe Tyr Trp His Lys Arg Gln Asn Glu Asp Ser Thr
  MISC_FEATURE (95)..(95): Xaa at this position is a single (one, 1) amino acid selected from the following options: Pro Ala Val Leu Ile Met Phe Tyr His Lys Arg Gln Asn Glu Asp Ser Thr
  MISC_FEATURE (96)..(96): Xaa at this position is a single (one, 1) amino acid selected from the following options: Gly Pro Ala Val Leu Ile Met Cys Phe Tyr Trp His Lys Arg Gln Asn Glu Asp Ser Thr
  MISC_FEATURE (97)..(97): Xaa at this position is a single (one, 1) amino acid selected from the following options: Gly Pro Ala Leu Ile Phe Tyr His Lys Arg Gln Asn Glu Asp Ser Thr
  MISC_FEATURE (98)..(98): Xaa at this position is a single (one, 1) amino acid selected from the following options: Gly Pro Ala Val Leu Ile Met Cys Tyr Trp His Lys Arg Gln Asn Glu Asp Ser Thr
  MISC_FEATURE (99)..(99): Xaa at this position is a single (one, 1) amino acid selected from the following options: Gly Pro Ala Val Leu Ile Met Tyr Trp His Lys Gln Asn Glu Asp Ser Thr
  MISC_FEATURE (100)..(100): Xaa at this position is a single (one, 1) amino acid selected from the following options: Gly Pro Ala Val Leu Ile Cys Phe Tyr Lys Arg Gln Asn Glu Asp Ser Thr
  MISC_FEATURE (101)..(101): Xaa at this position is a single (one, 1) amino acid selected from the following options: Gly Pro Ala Val Leu Ile Met Phe Tyr Trp His Lys Arg Gln Asn Glu Asp Ser Thr
  MISC_FEATURE (102)..(102): Xaa at this position is a single (one, 1) amino acid selected from the following options: Gly Pro Ala Val Leu Ile Met Phe Tyr His Lys Arg Gln Asn Glu Asp Ser Thr
  MISC_FEATURE (103)..(103): Xaa at this position is a single (one, 1) amino acid selected from the following options: Gly Ala Val Leu Ile Met His Lys Arg Gln Asn Glu Asp Ser Thr
  MISC_FEATURE (104)..(104): Xaa at this position is a single (one, 1) amino acid selected from the following options: Gly Pro Ala Val Leu Ile Met Cys Phe Tyr Trp His Lys Arg Gln Asn Glu Asp Ser Thr
  MISC_FEATURE (105)..(105): Xaa at this position is a single (one, 1) amino acid selected from the following options: Gly Pro Ala Val Leu Ile Phe Tyr Trp His Lys Arg Gln Asn Glu Asp Ser Thr
  MISC_FEATURE (106)..(106): Xaa at this position is a single (one, 1) amino acid selected from the following options: Gly Pro Ala Leu Ile Cys His Lys Arg Gln Asn Glu Asp Ser Thr
  MISC_FEATURE (107)..(107): Xaa at this position is a single (one, 1) amino acid selected from the following options: Gly Pro Ala Val Leu Ile Met Cys Phe Tyr Trp His Lys Arg Gln Glu Asp Ser Thr or is absent (no amino acid at this position and so this position is not present)
  MISC_FEATURE (108)..(108): Xaa at this position is a single (one, 1) amino acid selected from the following options: Gly Ala Val Ile Cys Phe Tyr His Lys Arg Gln Asn Glu Asp Ser Thr or is absent (no amino acid at this position and so this position is not present)
  MISC_FEATURE (109)..(109): Xaa at this position is a single (one, 1) amino acid selected from the following options: Gly Ala Val Leu Ile Phe Tyr His Lys Arg Gln Asn Glu Asp Ser Thr or is absent (no amino acid at this position and so this position is not present)
  MISC_FEATURE (110)..(110): Asp or is absent (no amino acid at this position and so this position is not present)
  MISC_FEATURE (111)..(111): Asp or is absent (no amino acid at this position and so this position is not present)
  MISC_FEATURE (112)..(112): Asp or is absent (no amino acid at this position and so this position is not present)
  MISC_FEATURE (113)..(113): Asp or is absent (no amino acid at this position and so this position is not present)
  MISC_FEATURE (114)..(114): Asp or is absent (no amino acid at this position and so this position is not present)
XXXXXXXXXXXXXXXXXXXXXXXXXXXXXXXXXXXXXXXXXXXXXXXXXXXXXXXXXXXXXXXXXXXXXXXXXXXXXXXXXXXXXXXXXXXXXXXXXXXXXXXXXXXXXXXXXX

SEQ ID NO: 4 - protein, 89 aa, Artificial Sequence
  Designed; as detailed elsewhere in present application
  MISC_FEATURE (1)..(1): Xaa at this position is a single (one, 1) amino acid selected from the following options: Gly Pro Ala Val Leu Ile Met Cys Phe Tyr Trp His Lys Arg Glu Asp Ser Thr
  MISC_FEATURE (2)..(2): Xaa at this position is a single (one, 1) amino acid selected from the following options: Gly Ala Val Leu Ile Met Cys Phe Tyr Trp His Lys Arg Gln Asn Glu Asp Ser Thr
  MISC_FEATURE (3)..(3): Xaa at this position is a single (one, 1) amino acid selected from the following options: Gly Pro Ala Val Leu Ile Met Cys Phe Tyr His Lys Arg Gln Glu Asp Ser Thr
  MISC_FEATURE (4)..(4): Xaa at this position is a single (one, 1) amino acid selected from the following options: Gly Pro Ala Val Leu Ile Met Cys Phe Tyr His Lys Arg Gln Asn Glu Asp Ser Thr
  MISC_FEATURE (5)..(5): Xaa at this position is a single (one, 1) amino acid selected from the following options: Gly Pro Ala Val Leu Ile Met Cys Phe His Lys Arg Gln Asn Glu Asp Ser Thr
  MISC_FEATURE (6)..(6): Xaa at this position is a single (one, 1) amino acid selected from the following options: Gly Pro Ala Val Leu Met Phe Tyr His Lys Arg Gln Asn Glu Asp Ser Thr
  MISC_FEATURE (7)..(7): Xaa at this position is a single (one, 1) amino acid selected from the following options: Gly Pro Ala Val Leu Ile Met Cys Phe Tyr His Lys Arg Gln Asn Glu Asp Ser Thr
  MISC_FEATURE (8)..(8): Xaa at this position is a single (one, 1) amino acid selected from the following options: Gly Pro Ala Val Leu Ile Met Cys Phe Tyr Trp His Lys Arg Gln Asn Glu Asp Ser
  MISC_FEATURE (9)..(9): Xaa at this position is a single (one, 1) amino acid selected from the following options: Gly Pro Ala Val Leu Ile Met Cys Phe Tyr Lys Arg Gln Asn Glu Asp Ser Thr
  MISC_FEATURE (10)..(10): Xaa at this position is a single (one, 1) amino acid selected from the following options: Gly Pro Ala Val Leu Ile Met Phe Tyr Trp Lys Arg Gln Asn Glu Asp Ser Thr
  MISC_FEATURE (11)..(11): Xaa at this position is a single (one, 1) amino acid selected from the following options: Gly Pro Ala Val Leu Met Cys Phe His Lys Arg Glu Asp Ser Thr
  MISC_FEATURE (12)..(12): Xaa at this position is a single (one, 1) amino acid selected from the following options: Gly Pro Ala Val Leu Ile Met Cys Phe Tyr Lys Arg Asn Glu Asp Ser Thr
  MISC_FEATURE (13)..(13): Xaa at this position is a single (one, 1) amino acid selected from the following options: Gly Pro Ala Val Leu Ile Met Phe Tyr Trp Lys Arg Gln Asn Glu Asp Ser Thr
  MISC_FEATURE (14)..(14): Xaa at this position is a single (one, 1) amino acid selected from the following options: Gly Pro Ala Val Leu Ile Met Cys Phe Tyr Trp His Lys Arg Gln Asn Glu Asp Ser Thr
  MISC_FEATURE (15)..(15): Xaa at this position is a single (one, 1) amino acid selected from the following options: Gly Pro Ala Val Leu Ile Cys Phe Tyr Trp His Lys Arg Gln Glu Asp Ser Thr
  MISC_FEATURE (16)..(16): Xaa at this position is a single (one, 1) amino acid selected from the following options: Gly Pro Ala Val Leu Ile Cys Tyr His Lys Arg Gln Asn Glu Asp Ser Thr
  MISC_FEATURE (17)..(17): Xaa at this position is a single (one, 1) amino acid selected from the following options: Gly Pro Ala Val Leu Ile Met Cys Trp His Lys Arg Gln Asn Glu Asp Ser Thr
  MISC_FEATURE (18)..(18): Xaa at this position is a single (one, 1) amino acid selected from the following options: Gly Pro Ala Val Leu Ile Met Cys Phe Tyr Trp His Lys Arg Gln Glu Asp Ser Thr
  MISC_FEATURE (19)..(19): Xaa at this position is a single (one, 1) amino acid selected from the following options: Gly Pro Ala Val Leu Ile Met Phe Tyr His Lys Arg Gln Glu Asp Ser
  MISC_FEATURE (20)..(20): Xaa at this position is a single (one, 1) amino acid selected from the following options: Gly Pro Ala Val Leu Met Phe His Lys Arg Gln Asn Glu Asp Ser Thr
  MISC_FEATURE (21)..(21): Xaa at this position is a single (one, 1) amino acid selected from the following options: Gly Pro Ala Val Leu Ile Met Phe Trp His Lys Arg Gln Asn Glu Asp Ser Thr
  MISC_FEATURE (22)..(22): Xaa at this position is a single (one, 1) amino acid selected from the following options: Gly Pro Ala Val Leu Ile Met Cys Phe His Lys Arg Gln Glu Asp Ser Thr
  MISC_FEATURE (23)..(23): Xaa at this position is a single (one, 1) amino acid selected from the following options: Gly Pro Ala Val Leu Ile Met Cys Phe Tyr Trp Lys Arg Gln Asn Glu Asp Ser Thr
  MISC_FEATURE (24)..(24): Xaa at this position is a single (one, 1) amino acid selected from the following options: Gly Ala Val Leu Met Cys Phe Trp His Lys Arg Gln Asn Glu Asp Ser
  MISC_FEATURE (25)..(25): Xaa at this position is a single (one, 1) amino acid selected from the following options: Gly Pro Ala Val Leu Ile Met Cys Phe Tyr His Lys Arg Gln Asn Glu Asp Ser Thr
  MISC_FEATURE (26)..(26): Xaa at this position is a single (one, 1) amino acid selected from the following options: Gly Pro Ala Val Leu Ile Met Cys Phe Tyr Trp His Lys Arg Gln Asn Glu Asp Ser Thr
  MISC_FEATURE (27)..(27): Xaa at this position is a single (one, 1) amino acid selected from the following options: Gly Ala Val Leu Ile Met Cys Phe Tyr His Lys Arg Gln Asn Glu Asp Ser Thr
  MISC_FEATURE (28)..(28): Xaa at this position is a single (one, 1) amino acid selected from the following options: Gly Pro Ala Val Leu Ile Met Phe His Lys Arg Gln Asn Glu Asp Ser Thr
  MISC_FEATURE (29)..(29): Xaa at this position is a single (one, 1) amino acid selected from the following options: Gly Pro Ala Val Leu Ile Met Phe His Lys Arg Gln Glu Asp Ser
  MISC_FEATURE (30)..(30): Xaa at this position is a single (one, 1) amino acid selected from the following options: Gly Pro Ala Val Leu Ile Met Cys Phe Tyr Trp His Lys Arg Gln Asn Glu Asp Ser Thr
  MISC_FEATURE (31)..(31): Xaa at this position is a single (one, 1) amino acid selected from the following options: Gly Pro Ala Val Leu Ile Met Phe Tyr Trp Lys Arg Gln Glu Ser Thr
  MISC_FEATURE (32)..(32): Xaa at this position is a single (one, 1) amino acid selected from the following options: Gly Ala Val Leu Met Cys Phe Tyr His Lys Arg Gln Glu Asp Ser Thr
  MISC_FEATURE (33)..(33): Xaa at this position is a single (one, 1) amino acid selected from the following options: Gly Pro Ala Leu Ile Met Cys Phe Tyr His Lys Arg Gln Asn Glu Asp Ser Thr
  MISC_FEATURE (34)..(34): Xaa at this position is a single (one, 1) amino acid selected from the following options: Gly Pro Ala Val Leu Ile Met Cys Phe Tyr His Lys Arg Gln Asn Glu Asp Ser Thr
  MISC_FEATURE (35)..(35): Xaa at this position is a single (one, 1) amino acid selected from the following options: Gly Ala Val Leu Ile Met Cys Phe Tyr His Lys Arg Gln Glu Asp Ser Thr
  MISC_FEATURE (36)..(36): Xaa at this position is a single (one, 1) amino acid selected from the following options: Gly Ala Val Leu Ile Met Cys Phe Tyr His Lys Arg Gln Glu Asp Ser Thr
  MISC_FEATURE (37)..(37): Xaa at this position is a single (one, 1) amino acid selected from the following options: Gly Pro Ala Leu Ile Met Cys Phe His Lys Arg Gln Asn Glu Asp Ser Thr
  MISC_FEATURE (38)..(38): Xaa at this position is a single (one, 1) amino acid selected from the following options: Gly Ala Val Leu Ile Met Tyr His Lys Arg Gln Asn Glu Asp Ser Thr
  MISC_FEATURE (39)..(39): Xaa at this position is a single (one, 1) amino acid selected from the following options: Gly Pro Ala Val Leu Ile Met Phe Tyr Trp His Lys Arg Gln Glu Asp Ser
  MISC_FEATURE (40)..(40): Xaa at this position is a single (one, 1) amino acid selected from the following options: Gly Ala Val Leu Met Cys Phe His Lys Arg Gln Glu Asp Ser Thr
  MISC_FEATURE (41)..(41): Xaa at this position is a single (one, 1) amino acid selected from the following options: Gly Pro Ala Val Leu Ile Cys Phe Tyr His Lys Arg Gln Asn Glu Asp Ser Thr
  MISC_FEATURE (42)..(42): Xaa at this position is a single (one, 1) amino acid selected from the following options: Gly Pro Ala Val Leu Ile Met Cys Phe Tyr His Lys Arg Gln Asn Glu Ser Thr
  MISC_FEATURE (43)..(43): Xaa at this position is a single (one, 1) amino acid selected from the following options: Gly Pro Ala Val Leu Ile Met Cys Tyr Lys Arg Gln Asn Glu Asp Ser Thr
  MISC_FEATURE (44)..(44): Xaa at this position is a single (one, 1) amino acid selected from the following options: Gly Ala Val Leu Ile Met Tyr His Lys Arg Gln Asn Glu Asp Ser Thr
  MISC_FEATURE (45)..(45): Xaa at this position is a single (one, 1) amino acid selected from the following options: Pro Ala Leu Ile Met Phe Tyr His Lys Arg Gln Asn Glu Asp Ser Thr
  MISC_FEATURE (46)..(46): Xaa at this position is a single (one, 1) amino acid selected from the following options: Gly Pro Ala Val Leu Ile Met Phe His Lys Arg Gln Asn Glu Asp Thr
  MISC_FEATURE (47)..(47): Xaa at this position is a single (one, 1) amino acid selected from the following options: Gly Pro Ala Val Leu Tyr His Lys Arg Gln Asn Glu Asp Ser Thr
  MISC_FEATURE (48)..(48): Xaa at this position is a single (one, 1) amino acid selected from the following options: Gly Pro Ala Val Leu Ile Met Cys Phe Tyr Trp His Lys Arg Gln Asn Glu Asp Ser Thr
  MISC_FEATURE (49)..(49): Xaa at this position is a single (one, 1) amino acid selected from the following options: Gly Pro Ala Val Leu Ile Met Cys Phe Tyr Trp His Lys Arg Gln Asn Glu Asp Ser Thr
  MISC_FEATURE (50)..(50): Xaa at this position is a single (one, 1) amino acid selected from the following options: Gly Pro Ala Val Leu Ile Met Phe Tyr His Lys Arg Gln Asn Glu Asp Ser Thr
  MISC_FEATURE (51)..(51): Xaa at this position is a single (one, 1) amino acid selected from the following options: Gly Pro Ala Leu Ile Met Tyr Lys Arg Gln Asn Glu Asp Ser Thr
  MISC_FEATURE (52)..(52): Xaa at this position is a single (one, 1) amino acid selected from the following options: Gly Pro Ala Val Leu Ile Phe His Lys Arg Gln Asn Glu Asp Ser
  MISC_FEATURE (53)..(53): Xaa at this position is a single (one, 1) amino acid selected from the following options: Ala Val Leu Ile Met Phe Tyr His Lys Arg Glu Asp Ser Thr
  MISC_FEATURE (54)..(54): Xaa at this position is a single (one, 1) amino acid selected from the following options: Gly Pro Ala Val Leu Ile Met Cys Phe Tyr His Lys Arg Gln Asn Glu Asp Ser Thr
  MISC_FEATURE (55)..(55): Xaa at this position is a single (one, 1) amino acid selected from the following options: Gly Pro Ala Val Leu Ile Met Cys Phe Tyr Trp His Lys Arg Gln Asn Glu Asp Ser Thr
  MISC_FEATURE (56)..(56): Xaa at this position is a single (one, 1) amino acid selected from the following options: Gly Pro Ala Val Leu Ile Met Cys Phe Tyr Trp His Lys Arg Gln Asn Glu Asp Ser Thr
  MISC_FEATURE (57)..(57): Xaa at this position is a single (one, 1) amino acid selected from the following options: Pro Ala Val Leu Ile Met Tyr His Lys Arg Gln Asn Glu Asp Ser Thr
  MISC_FEATURE (58)..(58): Xaa at this position is a single (one, 1) amino acid selected from the following options: Gly Pro Ala Val Leu Ile Met His Lys Arg Gln Asn Glu Asp Ser Thr
  MISC_FEATURE (59)..(59): Xaa at this position is a single (one, 1) amino acid selected from the following options: Gly Pro Ala Val Leu Ile Met Phe Trp His Lys Arg Gln Asn Glu Asp Ser Thr
  MISC_FEATURE (60)..(60): Xaa at this position is a single (one, 1) amino acid selected from the following options: Gly Ala Val Leu Ile Met Cys Phe His Lys Arg Gln Glu Asp Thr
  MISC_FEATURE (61)..(61): Xaa at this position is a single (one, 1) amino acid selected from the following options: Gly Pro Ala Val Leu Ile Met Cys Phe Trp His Lys Arg Gln Asn Glu Asp Ser Thr
  MISC_FEATURE (62)..(62): Xaa at this position is a single (one, 1) amino acid selected from the following options: Gly Pro Ala Leu Ile Cys Tyr His Lys Arg Gln Asn Glu Asp Thr
  MISC_FEATURE (63)..(63): Xaa at this position is a single (one, 1) amino acid selected from the following options: Gly Pro Ala Val Leu Ile Met Phe Tyr His Lys Arg Gln Asn Glu Asp Thr
  MISC_FEATURE (64)..(64): Xaa at this position is a single (one, 1) amino acid selected from the following options: Gly Pro Ala Val Leu Ile Met Cys His Lys Arg Gln Asn Glu Asp Ser Thr
  MISC_FEATURE (65)..(65): Xaa at this position is a single (one, 1) amino acid selected from the following options: Gly Pro Ala Val Leu Ile Met Phe Trp His Lys Arg Gln Asn Glu Asp Ser Thr
  MISC_FEATURE (66)..(66): Xaa at this position is a single (one, 1) amino acid selected from the following options: Gly Ala Val Leu Ile Phe Tyr Trp His Lys Arg Gln Asn Glu Asp Ser Thr
  MISC_FEATURE (67)..(67): Xaa at this position is a single (one, 1) amino acid selected from the following options: Pro Ala Val Leu Ile Met Phe His Lys Arg Gln Asn Glu Asp Ser Thr
  MISC_FEATURE (68)..(68): Xaa at this position is a single (one, 1) amino acid selected from the following options: Gly Pro Ala Val Leu Ile Cys Phe His Lys Arg Gln Asn Glu Asp Ser Thr
  MISC_FEATURE (69)..(69): Xaa at this position is a single (one, 1) amino acid selected from the following options: Gly Pro Ala Val Leu Ile Cys Phe Tyr Trp His Lys Arg Gln Asn Glu Asp Ser Thr
  MISC_FEATURE (70)..(70): Xaa at this position is a single (one, 1) amino acid selected from the following options: Pro Ala Val Leu Ile Met Phe Tyr His Lys Arg Gln Asn Glu Asp Ser Thr
  MISC_FEATURE (71)..(71): Xaa at this position is a single (one, 1) amino acid selected from the following options: Gly Pro Ala Val Leu Ile Met Cys Phe Tyr Trp His Lys Arg Gln Asn Glu Asp Ser Thr
  MISC_FEATURE (72)..(72): Xaa at this position is a single (one, 1) amino acid selected from the following options: Gly Pro Ala Leu Ile Phe Tyr His Lys Arg Gln Asn Glu Asp Ser Thr
  MISC_FEATURE (73)..(73): Xaa at this position is a single (one, 1) amino acid selected from the following options: Gly Pro Ala Val Leu Ile Met Cys Tyr Trp His Lys Arg Gln Asn Glu Asp Ser Thr
  MISC_FEATURE (74)..(74): Xaa at this position is a single (one, 1) amino acid selected from the following options: Gly Pro Ala Val Leu Ile Met Tyr Trp His Lys Gln Asn Glu Asp Ser Thr
  MISC_FEATURE (75)..(75): Xaa at this position is a single (one, 1) amino acid selected from the following options: Gly Pro Ala Val Leu Ile Cys Phe Tyr Lys Arg Gln Asn Glu Asp Ser Thr
  MISC_FEATURE (76)..(76): Xaa at this position is a single (one, 1) amino acid selected from the following options: Gly Pro Ala Val Leu Ile Met Phe Tyr Trp His Lys Arg Gln Asn Glu Asp Ser Thr
  MISC_FEATURE (77)..(77): Xaa at this position is a single (one, 1) amino acid selected from the following options: Gly Pro Ala Val Leu Ile Met Phe Tyr His Lys Arg Gln Asn Glu Asp Ser Thr
  MISC_FEATURE (78)..(78): Xaa at this position is a single (one, 1) amino acid selected from the following options: Gly Ala Val Leu Ile Met His Lys Arg Gln Asn Glu Asp Ser Thr
  MISC_FEATURE (79)..(79): Xaa at this position is a single (one, 1) amino acid selected from the following options: Gly Pro Ala Val Leu Ile Met Cys Phe Tyr Trp His Lys Arg Gln Asn Glu Asp Ser Thr
  MISC_FEATURE (80)..(80): Xaa at this position is a single (one, 1) amino acid selected from the following options: Gly Pro Ala Val Leu Ile Phe Tyr Trp His Lys Arg Gln Asn Glu Asp Ser Thr
  MISC_FEATURE (81)..(81): Xaa at this position is a single (one, 1) amino acid selected from the following options: Gly Pro Ala Leu Ile Cys His Lys Arg Gln Asn Glu Asp Ser Thr
  MISC_FEATURE (82)..(82): Xaa at this position is a single (one, 1) amino acid selected from the following options: Gly Pro Ala Val Leu Ile Met Cys Phe Tyr Trp His Lys Arg Gln Glu Asp Ser Thr or is absent (no amino acid at this position and so this position is not present)
  MISC_FEATURE (83)..(83): Xaa at this position is a single (one, 1) amino acid selected from the following options: Gly Ala Val Ile Cys Phe Tyr His Lys Arg Gln Asn Glu Asp Ser Thr or is absent (no amino acid at this position and so this position is not present)
  MISC_FEATURE (84)..(84): Xaa at this position is a single (one, 1) amino acid selected from the following options: Gly Ala Val Leu Ile Phe Tyr His Lys Arg Gln Asn Glu Asp Ser Thr or is absent (no amino acid at this position and so this position is not present)
  MISC_FEATURE (85)..(85): Asp or is absent (no amino acid at this position and so this position is not present)
  MISC_FEATURE (86)..(86): Asp or is absent (no amino acid at this position and so this position is not present)
  MISC_FEATURE (87)..(87): Asp or is absent (no amino acid at this position and so this position is not present)
  MISC_FEATURE (88)..(88): Asp or is absent (no amino acid at this position and so this position is not present)
  MISC_FEATURE (89)..(89): Asp or is absent (no amino acid at this position and so this position is not present)
XXXXXXXXXXXXXXXXXXXXXXXXXXXXXXXXXXXXXXXXXXXXXXXXXXXXXXXXXXXXXXXXXXXXXXXXXXXXXXXXXXXXXXXXX

SEQ ID NO: 5 - protein, 109 aa, Artificial Sequence
  Encompasses natural & artificial PRT sequences; artificial sequences designed by manual alignment (by their "pH dependence motif") of natural IF1 protein sequences from some long-lived species; more detail elsewhere in present application
  MISC_FEATURE (3)..(3): Xaa at this position is a single (one, 1) amino acid selected from the following options: Val Gly Ala Thr
  MISC_FEATURE (4)..(4): Xaa at this position is a single (one, 1) amino acid selected from the following options: Thr Ser Pro
  MISC_FEATURE (5)..(5): Xaa at this position is a single (one, 1) amino acid selected from the following options: Ala Val Glu
  MISC_FEATURE (6)..(6): Xaa at this position is a single (one, 1) amino acid selected from the following options: Leu Thr Gln
  MISC_FEATURE (7)..(7): Xaa at this position is a single (one, 1) amino acid selected from the following options: Ala Val
  MISC_FEATURE (8)..(8): Xaa at this position is a single (one, 1) amino acid selected from the following options: Ala Val Leu Ile Thr
  MISC_FEATURE (9)..(9): Xaa at this position is a single (one, 1) amino acid selected from the following options: Arg Gln Trp
  MISC_FEATURE (10)..(10): Xaa at this position is a single (one, 1) amino acid selected from the following options: Thr Val Met Ala Ser Leu
  MISC_FEATURE (11)..(11): Xaa at this position is a single (one, 1) amino acid selected from the following options: Trp Arg Gln
  MISC_FEATURE (12)..(12): Xaa at this position is a single (one, 1) amino acid selected from the following options: Leu Phe Gln
  MISC_FEATURE (13)..(13): Xaa at this position is a single (one, 1) amino acid selected from the following options: Gly Tyr Cys Ala Arg
  MISC_FEATURE (14)..(14): Xaa at this position is a single (one, 1) amino acid selected from the following options: Val Ser Ala Thr Met Arg
  MISC_FEATURE (15)..(15): Xaa at this position is a single (one, 1) amino acid selected from the following options: Trp Leu
  MISC_FEATURE (16)..(16): Xaa at this position is a single (one, 1) amino acid selected from the following options: Gly Ser
  MISC_FEATURE (17)..(17): Xaa at this position is a single (one, 1) amino acid selected from the following options: Val Ala Met
  MISC_FEATURE (18)..(18): Xaa at this position is a single (one, 1) amino acid selected from the following options: Arg Trp Lys Leu
  MISC_FEATURE (19)..(19): Xaa at this position is a single (one, 1) amino acid selected from the following options: Thr Ala Val Ser
  MISC_FEATURE (20)..(20): Xaa at this position is a single (one, 1) amino acid selected from the following options: Met Leu Ile Arg Val Ala Thr
  MISC_FEATURE (21)..(21): Xaa at this position is a single (one, 1) amino acid selected from the following options: Gln Arg
  MISC_FEATURE (22)..(22): Xaa at this position is a single (one, 1) amino acid selected from the following options: Ala Thr Gly Ser
  MISC_FEATURE (23)..(23): Xaa at this position is a single (one, 1) amino acid selected from the following options: Arg Gln Gly Leu
  MISC_FEATURE (24)..(24): Xaa at this position is a single (one, 1) amino acid selected from the following options: Gly Ser
  MISC_FEATURE (25)..(25): Xaa at this position is a single (one, 1) amino acid selected from the following options: Phe Tyr
  MISC_FEATURE (26)..(26): Xaa at this position is a single (one, 1) amino acid selected from the following options: Gly Ser Val Ala Thr
  MISC_FEATURE (27)..(27): Xaa at this position is a single (one, 1) amino acid selected from the following options: Ser Cys Arg
  MISC_FEATURE (28)..(28): Xaa at this position is a single (one, 1) amino acid selected from the following options: Asp Glu Gly Ser
  MISC_FEATURE (29)..(29): Xaa at this position is a single (one, 1) amino acid selected from the following options: Gln Arg Ser Thr Lys Pro
  MISC_FEATURE (30)..(30): Xaa at this position is a single (one, 1) amino acid selected from the following options: Ser Pro Ala Gly
  MISC_FEATURE (31)..(31): Xaa at this position is a single (one, 1) amino acid selected from the following options: Glu Asp Lys His Ala Gly Asn
  MISC_FEATURE (32)..(32): Xaa at this position is a single (one, 1) amino acid selected from the following options: Asn Asp Tyr Ser Gly Arg His
  MISC_FEATURE (33)..(33): Xaa at this position is a single (one, 1) amino acid selected from the following options: Val Leu Pro His Met Ile Phe Thr Gly
  MISC_FEATURE (34)..(34): Xaa at this position is a single (one, 1) amino acid selected from the following options: Asp Gly His Arg Ser Glu
  MISC_FEATURE (35)..(35): Xaa at this position is a single (one, 1) amino acid selected from the following options: Arg Ser Gly Thr Pro Ala
  MISC_FEATURE (36)..(36): Xaa at this position is a single (one, 1) amino acid selected from the following options: Gly Ser Arg Pro Lys Asp Arg Thr
  MISC_FEATURE (37)..(37): Xaa at this position is a single (one, 1) amino acid selected from the following options: Ala Glu Ser Glu
  MISC_FEATURE (38)..(38): Xaa at this position is a single (one, 1) amino acid selected from the following options: Gly Ala
  MISC_FEATURE (39)..(39): Xaa at this position is a single (one, 1) amino acid selected from the following options: Ser Ala Thr
  MISC_FEATURE (40)..(40): Xaa at this position is a single (one, 1) amino acid selected from the following options: Ile Val
  MISC_FEATURE (41)..(41): Xaa at this position is a single (one, 1) amino acid selected from the following options: Arg Lys Trp
  MISC_FEATURE (42)..(42): Xaa at this position is a single (one, 1) amino acid selected from the following options: Glu Asp Asn
  MISC_FEATURE (45)..(45): Xaa at this position is a single (one, 1) amino acid selected from the following options: Gly Val
  MISC_FEATURE (46)..(46): Xaa at this position is a single (one, 1) amino acid selected from the following options: Ala Ser Asp
  MISC_FEATURE (48)..(48): Xaa at this position is a single (one, 1) amino acid selected from the following options: Gly Ala Arg
  MISC_FEATURE (49)..(49): Xaa at this position is a single (one, 1) amino acid selected from the following options: Lys Arg
  MISC_FEATURE (50)..(50): Xaa at this position is a single (one, 1) amino acid selected from the following options: Arg Lys
  MISC_FEATURE (51)..(51): Xaa at this position is a single (one, 1) amino acid selected from the following options: Glu Ser
  MISC_FEATURE (52)..(52): Xaa at this position is a single (one, 1) amino acid selected from the following options: Gln Ala Lys Arg
  MISC_FEATURE (53)..(53): Xaa at this position is a single (one, 1) amino acid selected from the following options: Ala Ser
  MISC_FEATURE (54)..(54): Xaa at this position is a single (one, 1) amino acid selected from the following options: Glu Asp Lys
  MISC_FEATURE (55)..(55): Xaa at this position is a single (one, 1) amino acid selected from the following options: Glu Gly
  MISC_FEATURE (56)..(56): Xaa at this position is a single (one, 1) amino acid selected from the following options: Glu Asp
  MISC_FEATURE (59)..(59): Xaa at this position is a single (one, 1) amino acid selected from the following options: Phe Leu
  MISC_FEATURE (60)..(60): Xaa at this position is a single (one, 1) amino acid selected from the following options: Arg Leu
  MISC_FEATURE (61)..(61): Xaa at this position is a single (one, 1) amino acid selected from the following options: Ala Lys Glu Thr
  MISC_FEATURE (62)..(62): Xaa at this position is a single (one, 1) amino acid selected from the following options: Gln Arg Lys
  MISC_FEATURE (63)..(63): Xaa at this position is a single (one, 1) amino acid selected from the following options: Ser Thr Ala Asn
  MISC_FEATURE (64)..(64): Xaa at this position is a single (one, 1) amino acid selected from the following options: Arg Lys
  MISC_FEATURE (65)..(65): Xaa at this position is a single (one, 1) amino acid selected from the following options: Glu Gln
  MISC_FEATURE (68)..(68): Xaa at this position is a single (one, 1) amino acid selected from the following options: Ala Leu Glu Thr
  MISC_FEATURE (69)..(69): Xaa at this position is a single (one, 1) amino acid selected from the following options: Ala Thr Arg Ile
  MISC_FEATURE (71)..(71): Xaa at this position is a single (one, 1) amino acid selected from the following options: Lys Arg
  MISC_FEATURE (73)..(73): Xaa at this position is a single (one, 1) amino acid selected from the following options: His Tyr
  MISC_FEATURE (76)..(76): Xaa at this position is a single (one, 1) amino acid selected from the following options: Glu Asp Asn
  MISC_FEATURE (78)..(78): Xaa at this position is a single (one, 1) amino acid selected from the following options: Ile Val
  MISC_FEATURE (79)..(79): Xaa at this position is a single (one, 1) amino acid selected from the following options: Val Thr Ser Asp Asn Gly Ala Glu Gln
  MISC_FEATURE (80)..(80): Xaa at this position is a single (one, 1) amino acid selected from the following options: His Val Tyr
  MISC_FEATURE (81)..(81): Xaa at this position is a single (one, 1) amino acid selected from the following options: His Ser Thr
  MISC_FEATURE (82)..(82): Xaa at this position is a single (one, 1) amino acid selected from the following options: Lys Ser Met Val His Ala Arg Gln Glu
  MISC_FEATURE (83)..(83): Xaa at this position is a single (one, 1) amino acid selected from the following options: Lys Glu Gln Arg
  MISC_FEATURE (86)..(86): Xaa at this position is a single (one, 1) amino acid selected from the following options: Glu Lys
  MISC_FEATURE (87)..(87): Xaa at this position is a single (one, 1) amino acid selected from the following options: Arg His
  MISC_FEATURE (90)..(90): Xaa at this position is a single (one, 1) amino acid selected from the following options: Lys Asn
  MISC_FEATURE (91)..(91): Xaa at this position is a single (one, 1) amino acid selected from the following options: Glu Gln
  MISC_FEATURE (93)..(93): Xaa at this position is a single (one, 1) amino acid selected from the following options: Glu Gln
  MISC_FEATURE (94)..(94): Xaa at this position is a single (one, 1) amino acid selected from the following options: Arg Gln
  MISC_FEATURE (96)..(96): Xaa at this position is a single (one, 1) amino acid selected from the following options: Lys Gln
  MISC_FEATURE (97)..(97): Xaa at this position is a single (one, 1) amino acid selected from the following options: Gln Lys Glu
  MISC_FEATURE (98)..(98): Xaa at this position is a single (one, 1) amino acid selected from the following options: Lys Arg Ser Ala Asn Thr
  MISC_FEATURE (99)..(99): Xaa at this position is a single (one, 1) amino acid selected from the following options: Ile Met
  MISC_FEATURE (100)..(100): Xaa at this position is a single (one, 1) amino acid selected from the following options: Lys Gln
  MISC_FEATURE (101)..(101): Xaa at this position is a single (one, 1) amino acid selected from the following options: Met Thr Lys His Tyr Ser Gln Ile Val Asn
  MISC_FEATURE (103)..(103): Xaa at this position is a single (one, 1) amino acid selected from the following options: Lys Asn Ser His
  MISC_FEATURE (104)..(104): Xaa at this position is a single (one, 1) amino acid selected from the following options: His Asp Asn Ser Arg Gln Glu Tyr
  MISC_FEATURE (105)..(105): Xaa at this position is a single (one, 1) amino acid selected from the following options: Asp His Ser Asn Ile
  MISC_FEATURE (106)..(106): Xaa at this position is a single (one, 1) amino acid selected from the following options: Asp Glu His Gly or is absent (no amino acid at this position and so this position is not present)
  MISC_FEATURE (107)..(107): Xaa at this position is a single (one, 1) amino acid selected from the following options: Asp His or is absent (no amino acid at this position and so this position is not present)
  MISC_FEATURE (108)..(108): Xaa at this position is a single (one, 1) amino acid selected from the following options: Asp or is absent (no amino acid at this position and so this position is not present)
  MISC_FEATURE (109)..(109): Xaa at this position is a single (one, 1) amino acid selected from the following options: Asp or is absent (no amino acid at this position and so this position is not present)
MAXXXXXXXXXXXXXXXXXXXXXXXXXXXXXXXXXXXXXXXXAGXXFXXXXXXXXXRYXXXXXXXQLXXLXKXHEXEXXXXXXEIXXLQXXIXXHXXXXXXLXXXXXXX

SEQ ID NO: 6 - protein, 109 aa, Artificial Sequence
  Designed; as detailed elsewhere in present application
  MISC_FEATURE (3)..(3): Xaa at this position is a single (one, 1) amino acid selected from the following options: Val Ala
  MISC_FEATURE (7)..(7): Xaa at this position is a single (one, 1) amino acid selected from the following options: Ala Val
  MISC_FEATURE (11)..(11): Xaa at this position is a single (one, 1) amino acid selected from the following options: Trp Arg
  MISC_FEATURE (12)..(12): Xaa at this position is a single (one, 1) amino acid selected from the following options: Leu Phe
  MISC_FEATURE (16)..(16): Xaa at this position is a single (one, 1) amino acid selected from the following options: Gly Ser
  MISC_FEATURE (18)..(18): Xaa at this position is a single (one, 1) amino acid selected from the following options: Arg Trp
  MISC_FEATURE (19)..(19): Xaa at this position is a single (one, 1) amino acid selected from the following options: Thr Ala
  MISC_FEATURE (22)..(22): Xaa at this position is a single (one, 1) amino acid selected from the following options: Ala Gly
  MISC_FEATURE (28)..(28): Xaa at this position is a single (one, 1) amino acid selected from the following options: Asp Glu
  MISC_FEATURE (29)..(29): Xaa at this position is a single (one, 1) amino acid selected from the following options: Gln Ser
  MISC_FEATURE (30)..(30): Xaa at this position is a single (one, 1) amino acid selected from the following options: Ser Ala
  MISC_FEATURE (31)..(31): Xaa at this position is a single (one, 1) amino acid selected from the following options: Glu Asp
  MISC_FEATURE (33)..(33): Xaa at this position is a single (one, 1) amino acid selected from the following options: Val Leu
  MISC_FEATURE (34)..(34): Xaa at this position is a single (one, 1) amino acid selected from the following options: Asp Gly
  MISC_FEATURE (35)..(35): Xaa at this position is a single (one, 1) amino acid selected from the following options: Arg Ser
  MISC_FEATURE (36)..(36): Xaa at this position is a single (one, 1) amino acid selected from the following options: Gly Ser
  MISC_FEATURE (39)..(39): Xaa at this position is a single (one, 1) amino acid selected from the following options: Ser Ala
  MISC_FEATURE (40)..(40): Xaa at this position is a single (one, 1) amino acid selected from the following options: Ile Val
  MISC_FEATURE (42)..(42): Xaa at this position is a single (one, 1) amino acid selected from the following options: Glu Asp
  MISC_FEATURE (50)..(50): Xaa at this position is a single (one, 1) amino acid selected from the following options: Arg Lys
  MISC_FEATURE (54)..(54): Xaa at this position is a single (one, 1) amino acid selected from the following options: Glu Asp
  MISC_FEATURE (56)..(56): Xaa at this position is a single (one, 1) amino acid selected from the following options: Glu Asp
  MISC_FEATURE (62)..(62): Xaa at this position is a single (one, 1) amino acid selected from the following options: Gln Arg
  MISC_FEATURE (63)..(63): Xaa at this position is a single (one, 1) amino acid selected from the following options: Ser Thr Ala
  MISC_FEATURE (64)..(64): Xaa at this position is a single (one, 1) amino acid selected from the following options: Arg Lys
  MISC_FEATURE (71)..(71): Xaa at this position is a single (one, 1) amino acid selected from the following options: Lys Arg
  MISC_FEATURE (73)..(73): Xaa at this position is a single (one, 1) amino acid selected from the following options: His Tyr
  MISC_FEATURE (76)..(76): Xaa at this position is a single (one, 1) amino acid selected from the following options: Glu Asp Asn
  MISC_FEATURE (79)..(79): Xaa at this position is a single (one, 1) amino acid selected from the following options: Val Ser
  MISC_FEATURE (82)..(82): Xaa at this position is a single (one, 1) amino acid selected from the following options: Lys Val Met
  MISC_FEATURE (87)..(87): Xaa at this position is a single (one, 1) amino acid selected from the following options: Arg His
  MISC_FEATURE (91)..(91): Xaa at this position is a single (one, 1) amino acid selected from the following options: Glu Gln
  MISC_FEATURE (98)..(98): Xaa at this position is a single (one, 1) amino acid selected from the following options: Lys Ser
  MISC_FEATURE (101)..(101): Xaa at this position is a single (one, 1) amino acid selected from the following options: Met Thr Lys
  MISC_FEATURE (106)..(106): Asp or is absent (no amino acid at this position and so this position is not present)
  MISC_FEATURE (107)..(107): Asp or is absent (no amino acid at this position and so this position is not present)
  MISC_FEATURE (108)..(108): Asp or is absent (no amino acid at this position and so this position is not present)
  MISC_FEATURE (109)..(109): Asp or is absent (no amino acid at this position and so this position is not present)
MAXTALXARTXXGVWXVXXMQXRGFGSXXXXNXXXXAGXXRXAGGAFGKXEQAXEXRYFRAXXXEQLAALXKXHEXEIXHHXKEIEXLQKXIERHKQXIKXLKHDXXXX

SEQ ID NO: 7 - protein, 107 aa, Artificial Sequence
  Designed; as detailed elsewhere in present application
  misc_feature (3)..(3): Xaa at this position is a single (one, 1) amino acid selected from the following options: Ala Thr Val
  misc_feature (4)..(4): Xaa at this position is a single (one, 1) amino acid selected from the following options: Thr Ser
  misc_feature (5)..(5): Xaa at this position is a single (one, 1) amino acid selected from the following options: Ala Glu
  misc_feature (7)..(7): Xaa at this position is a single (one, 1) amino acid selected from the following options: Ala Val
  misc_feature (9)..(9): Xaa at this position is a single (one, 1) amino acid selected from the following options: Arg Trp
  misc_feature (10)..(10): Xaa at this position is a single (one, 1) amino acid selected from the following options: Thr Met
  misc_feature (11)..(11): Xaa at this position is a single (one, 1) amino acid selected from the following options: Arg Gln Trp
  misc_feature (12)..(12): Xaa at this position is a single (one, 1) amino acid selected from the following options: Phe Leu
  misc_feature (13)..(13): Xaa at this position is a single (one, 1) amino acid selected from the following options: Gly Arg Tyr Cys
  misc_feature (14)..(14): Xaa at this position is a single (one, 1) amino acid selected from the following options: Val Ser Ala Met
  misc_feature (15)..(15): Xaa at this position is a single (one, 1) amino acid selected from the following options: Trp Leu
  misc_feature (16)..(16): Xaa at this position is a single (one, 1) amino acid selected from the following options: Ser Gly
  misc_feature (17)..(17): Xaa at this position is a single (one, 1) amino acid selected from the following options: Val Ala
  misc_feature (18)..(18): Xaa at this position is a single (one, 1) amino acid selected from the following options: Trp Arg
  misc_feature (19)..(19): Xaa at this position is a single (one, 1) amino acid selected from the following options: Ala Thr Val
  misc_feature (20)..(20): Xaa at this position is a single (one, 1) amino acid selected from the following options: Met Val Arg
  misc_feature (22)..(22): Xaa at this position is a single (one, 1) amino acid selected from the following options: Gly Ala Thr
  misc_feature (23)..(23): Xaa at this position is a single (one, 1) amino acid selected from the following options: Arg Leu Gln
  misc_feature (24)..(24): Xaa at this position is a single (one, 1) amino acid selected from the following options: Gly Ser
  misc_feature (26)..(26): Xaa at this position is a single (one, 1) amino acid selected from the following options: Gly Ser
  misc_feature (28)..(28): Xaa at this position is a single (one, 1) amino acid selected from the following options: Glu Asp
  misc_feature (29)..(29): Xaa at this position is a single (one, 1) amino acid selected from the following options: Ser Gln Pro
  misc_feature (30)..(30): Xaa at this position is a single (one, 1) amino acid selected from the following options: Ala Ser Pro
  misc_feature (31)..(31): Xaa at this position is a single (one, 1) amino acid selected from the following options: Asp Glu His
  misc_feature (32)..(32): Xaa at this position is a single (one, 1) amino acid selected from the following options: Asn Asp
  misc_feature (33)..(33): Xaa at this position is a single (one, 1) amino acid selected from the following options: Leu Val
  misc_feature (34)..(34): Xaa at this position is a single (one, 1) amino acid selected from the following options: Gly Asp Arg
  misc_feature (35)..(35): Xaa at this position is a single (one, 1) amino acid selected from the following options: Ser Arg
  misc_feature (36)..(36): Xaa at this position is a single (one, 1) amino acid selected from the following options: Ser Gly Thr Arg
  misc_feature (37)..(37): Xaa at this position is a single (one, 1) amino acid selected from the following options: Ala Glu Ser
  misc_feature (38)..(38): Xaa at this position is a single (one, 1) amino acid selected from the following options: Gly Ala
  misc_feature (39)..(39): Xaa at this position is a single (one, 1) amino acid selected from the following options: Ala Ser Thr
  misc_feature (40)..(40): Xaa at this position is a single (one, 1) amino acid selected from the following options: Ile Val
  misc_feature (41)..(41): Xaa at this position is a single (one, 1) amino acid selected from the following options: Arg Trp
  misc_feature (42)..(42): Xaa at this position is a single (one, 1) amino acid selected from the following options: Asp Asn Glu
  misc_feature (45)..(45): Xaa at this position is a single (one, 1) amino acid selected from the following options: Gly Val
  misc_feature (46)..(46): Xaa at this position is a single (one, 1) amino acid selected from the following options: Ala Asp
  misc_feature (48)..(48): Xaa at this position is a single (one, 1) amino acid selected from the following options: Gly Arg Ala
  misc_feature (50)..(50): Xaa at this position is a single (one, 1) amino acid selected from the following options: Lys Arg
  misc_feature (52)..(52): Xaa at this position is a single (one, 1) amino acid selected from the following options: Gln Ala
  misc_feature (54)..(54): Xaa at this position is a single (one, 1) amino acid selected from the following options: Glu Lys
  misc_feature (55)..(55): Xaa at this position is a single (one, 1) amino acid selected from the following options: Glu Gly
  misc_feature (59)..(59): Xaa at this position is a single (one, 1) amino acid selected from the following options: Phe Leu
  misc_feature (62)..(62): Xaa at this position is a single (one, 1) amino acid selected from the following options: Arg Gln
  misc_feature (63)..(63): Xaa at this position is a single (one, 1) amino acid selected from the following options: Ala Ser Thr
  misc_feature (64)..(64): Xaa at this position is a single (one, 1) amino acid selected from the following options: Lys Arg
  misc_feature (68)..(68): Xaa at this position is a single (one, 1) amino acid selected from the following options: Ala Thr
  misc_feature (69)..(69): Xaa at this position is a single (one, 1) amino acid selected from the following options: Ala Thr
  misc_feature (73)..(73): Xaa at this position is a single (one, 1) amino acid selected from the following options: His Tyr
  misc_feature (76)..(76): Xaa at this position is a single (one, 1) amino acid selected from the following options: Asn Glu Asp
  misc_feature (79)..(79): Xaa at this position is a single (one, 1) amino acid selected from the following options: Ser Thr Gly Val
  misc_feature (81)..(81): Xaa at this position is a single (one, 1) amino acid selected from the following options: His Ser Thr
  misc_feature (82)..(82): Xaa at this position is a single (one, 1) amino acid selected from the following options: Val Met Lys Glu
  misc_feature (87)..(87): Xaa at this position is a single (one, 1) amino acid selected from the following options: His Arg
  misc_feature (90)..(90): Xaa at this position is a single (one, 1) amino acid selected from the following options: Lys Asn
  misc_feature (98)..(98): Xaa at this position is a single (one, 1) amino acid selected from the following options: Ser Lys
  misc_feature (101)..(101): Xaa at this position is a single (one, 1) amino acid selected from the following options: Lys Met Ile Thr
  misc_feature (104)..(104): Xaa at this position is a single (one, 1) amino acid selected from the following options: His Gln Arg Asp
  misc_feature (105)..(105): Xaa at this position is a single (one, 1) amino acid selected from the following options: Asp Asn
  misc_feature (107)..(107): Asp or is absent (no amino acid at this position and so this position is not present)
MAXXXLXAXXXXXXXXXXXXQXXXFXSXXXXXXXXXXXXXXXAGXXFXKXEXAXXERYXRAXXXEQLXXLKKXHEXEIXHXXKEIEXLQXEIERHKQXIKXLKXXDX

SEQ ID NO: 8 - protein, 107 aa, Artificial Sequence
  Designed; as detailed elsewhere in present application
  MISC_FEATURE (11)..(11): Xaa at this position is a single (one, 1) amino acid selected from the following options: Arg Trp
  MISC_FEATURE (12)..(12): Xaa at this position is a single (one, 1) amino acid selected from the following options: Phe Leu
  MISC_FEATURE (16)..(16): Xaa at this position is a single (one, 1) amino acid selected from the following options: Ser Gly
  MISC_FEATURE (18)..(18): Xaa at this position is a single (one, 1) amino acid selected from the following options: Trp Arg
  MISC_FEATURE (19)..(19): Xaa at this position is a single (one, 1) amino acid selected from the following options: Ala Thr
  MISC_FEATURE (22)..(22): Xaa at this position is a single (one, 1) amino acid selected from the following options: Gly Ala
  MISC_FEATURE (28)..(28): Xaa at this position is a single (one, 1) amino acid selected from the following options: Glu Asp
  MISC_FEATURE (29)..(29): Xaa at this position is a single (one, 1) amino acid selected from the following options: Ser Gln
  MISC_FEATURE (30)..(30): Xaa at this position is a single (one, 1) amino acid selected from the following options: Ala Ser
  MISC_FEATURE (31)..(31): Xaa at this position is a single (one, 1) amino acid selected from the following options: Asp Glu
  MISC_FEATURE (34)..(34): Xaa at this position is a single (one, 1) amino acid selected from the following options: Gly Asp
  MISC_FEATURE (35)..(35): Xaa at this position is a single (one, 1) amino acid selected from the following options: Ser Arg
  MISC_FEATURE (36)..(36): Xaa at this position is a single (one, 1) amino acid selected from the following options: Ser Gly
  MISC_FEATURE (39)..(39): Xaa at this position is a single (one, 1) amino acid selected from the following options: Ala Ser
  MISC_FEATURE (40)..(40): Xaa at this position is a single (one, 1) amino acid selected from the following options: Ile Val
  MISC_FEATURE (42)..(42): Xaa at this position is a single (one, 1) amino acid selected from the following options: Asp Glu
  MISC_FEATURE (50)..(50): Xaa at this position is a single (one, 1) amino acid selected from the following options: Lys Arg
  MISC_FEATURE (62)..(62): Xaa at this position is a single (one, 1) amino acid selected from the following options: Arg Gln
  MISC_FEATURE (64)..(64): Xaa at this position is a single (one, 1) amino acid selected from the following options: Lys Arg
  MISC_FEATURE (76)..(76): Xaa at this position is a single (one, 1) amino acid selected from the following options: Asn Glu Asp
  MISC_FEATURE (79)..(79): Xaa at this position is a single (one, 1) amino acid selected from the following options: Ser Val
  MISC_FEATURE (82)..(82): Xaa at this position is a single (one, 1) amino acid selected from the following options: Val Met Lys
  MISC_FEATURE (87)..(87): Xaa at this position is a single (one, 1) amino acid selected from the following options: His Arg
  MISC_FEATURE (98)..(98): Xaa at this position is a single (one, 1) amino acid selected from the following options: Ser Lys
MAATALAARTXXGVWXVXXMQXRGFGSXXXXNLXXXAGXXRXAGGAFGKXEQAEEERYFRAXAXEQLAALKKHHEXEIXHHXKEIEXLQKEIERHKQXIKKLKHDDD

SEQ ID NO: 9 - protein, 108 aa, Artificial Sequence
  Designed; as detailed elsewhere in present application
  MISC_FEATURE (3)..(3): Xaa at this position is a single (one, 1) amino acid selected from the following options: Val Ala Thr
  MISC_FEATURE (4)..(4): Xaa at this position is a single (one, 1) amino acid selected from the following options: Thr Val
  MISC_FEATURE (5)..(5): Xaa at this position is a single (one, 1) amino acid selected from the following options: Ala Glu
  MISC_FEATURE (7)..(7): Xaa at this position is a single (one, 1) amino acid selected from the following options: Ala Val
  MISC_FEATURE (9)..(9): Xaa at this position is a single (one, 1) amino acid selected from the following options: Arg Trp
  MISC_FEATURE (10)..(10): Xaa at this position is a single (one, 1) amino acid selected from the following options: Thr Met Val
  MISC_FEATURE (11)..(11): Xaa at this position is a single (one, 1) amino acid selected from the following options: Arg Trp Gln
  MISC_FEATURE (12)..(12): Xaa at this position is a single (one, 1) amino acid selected from the following options: Leu Phe
  MISC_FEATURE (13)..(13): Xaa at this position is a single (one, 1) amino acid selected from the following options: Gly Arg Tyr Cys
  MISC_FEATURE (14)..(14): Xaa at this position is a single (one, 1) amino acid selected from the following options: Val Ser Ala
  MISC_FEATURE (15)..(15): Xaa at this position is a single (one, 1) amino acid selected from the following options: Trp Leu
  MISC_FEATURE (16)..(16): Xaa at this position is a single (one, 1) amino acid selected from the following options: Gly Ser
  MISC_FEATURE (17)..(17): Xaa at this position is a single (one, 1) amino acid selected from the following options: Val Ala
  MISC_FEATURE (18)..(18): Xaa at this position is a single (one, 1) amino acid selected from the following options: Trp Arg
  MISC_FEATURE (19)..(19): Xaa at this position is a single (one, 1) amino acid selected from the following options: Ala Thr Val
  MISC_FEATURE (20)..(20): Xaa at this position is a single (one, 1) amino acid selected from the following options: Met Val
  MISC_FEATURE (22)..(22): Xaa at this position is a single (one, 1) amino acid selected from the following options: Gly Ala
  MISC_FEATURE (23)..(23): Xaa at this position is a single (one, 1) amino acid selected from the following options: Arg Gln Leu
  MISC_FEATURE (24)..(24): Xaa at this position is a single (one, 1) amino acid selected from the following options: Gly Met
  MISC_FEATURE (25)..(25): Xaa at this position is a single (one, 1) amino acid selected from the following options: Phe Gln
  MISC_FEATURE (26)..(26): Xaa at this position is a single (one, 1) amino acid selected from the following options: Gly Ser
  MISC_FEATURE (28)..(28): Xaa at this position is a single (one, 1) amino acid selected from the following options: Glu Asp
  MISC_FEATURE (29)..(29): Xaa at this position is a single (one, 1) amino acid selected from the following options: Ser Pro Gln
  MISC_FEATURE (30)..(30): Xaa at this position is a single (one, 1) amino acid selected from the following options: Ala Ser Pro
  MISC_FEATURE (31)..(31): Xaa at this position is a single (one, 1) amino acid selected from the following options: Asp Glu His
  MISC_FEATURE (32)..(32): Xaa at this position is a single (one, 1) amino acid selected from the following options: Asn Asp
  MISC_FEATURE (33)..(33): Xaa at this position is a single (one, 1) amino acid selected from the following options: Leu Val
  MISC_FEATURE (34)..(34): Xaa at this position is a single (one, 1) amino acid selected from the following options: Gly Asp Arg
  MISC_FEATURE (35)..(35): Xaa at this position is a single (one, 1) amino acid selected from the following options: Ser Arg
  MISC_FEATURE (36)..(36): Xaa at this position is a single (one, 1) amino acid selected from the following options: Ser Gly Arg Thr
  MISC_FEATURE (37)..(37): Xaa at this position is a single (one, 1) amino acid selected from the following options: Ala Glu
  MISC_FEATURE (38)..(38): Xaa at this position is a single (one, 1) amino acid selected from the following options: Gly Ala
  MISC_FEATURE (39)..(39): Xaa at this position is a single (one, 1) amino acid selected from the following options: Ala Ser Thr
  MISC_FEATURE (40)..(40): Xaa at this position is a single (one, 1) amino acid selected from the following options: Val Ile
  MISC_FEATURE (41)..(41): Xaa at this position is a single (one, 1) amino acid selected from the following options: Arg Trp
  MISC_FEATURE (42)..(42): Xaa at this position is a single (one, 1) amino acid selected from the following options: Asp Glu Asn
  MISC_FEATURE (45)..(45): Xaa at this position is a single (one, 1) amino acid selected from the following options: Gly Val
  MISC_FEATURE (46)..(46): Xaa at this position is a single (one, 1) amino acid selected from the following options: Ala Asp
  MISC_FEATURE (48)..(48): Xaa at this position is a single (one, 1) amino acid selected from the following options: Gly Arg Ala
  MISC_FEATURE (50)..(50): Xaa at this position is a single (one, 1) amino acid selected from the following options: Arg Lys
  MISC_FEATURE (52)..(52): Xaa at this position is a single (one, 1) amino acid selected from the following options: Gln Ala
  MISC_FEATURE (54)..(54): Xaa at this position is a single (one, 1) amino acid selected from the following options: Glu Lys
  MISC_FEATURE (55)..(55): Xaa at this position is a single (one, 1) amino acid selected from the following options: Glu Gly
  MISC_FEATURE (56)..(56): Xaa at this position is a single (one, 1) amino acid selected from the following options: Glu Gln
  MISC_FEATURE (59)..(59): Xaa at this position is a single (one, 1) amino acid selected from the following options: Phe Leu
  MISC_FEATURE (62)..(62): Xaa at this position is a single (one, 1) amino acid selected from the following options: Arg Gln Cys
  MISC_FEATURE (63)..(63): Xaa at this position is a single (one, 1) amino acid selected from the following options: Ala Ser
  MISC_FEATURE (64)..(64): Xaa at this position is a single (one, 1) amino acid selected from the following options: Lys Arg
  MISC_FEATURE (69)..(69): Xaa at this position is a single (one, 1) amino acid selected from the following options: Ala Thr
  MISC_FEATURE (73)..(73): Xaa at this position is a single (one, 1) amino acid selected from the following options: His Tyr
  MISC_FEATURE (76)..(76): Xaa at this position is a single (one, 1) amino acid selected from the following options: Asn Glu
  MISC_FEATURE (79)..(79): Xaa at this position is a single (one, 1) amino acid selected from the following options: Ser Val Thr
  MISC_FEATURE (81)..(81): Xaa at this position is a single (one, 1) amino acid selected from the following options: His Ser Thr
  MISC_FEATURE (82)..(82): Xaa at this position is a single (one, 1) amino acid selected from the following options: Val Lys Met Glu
  MISC_FEATURE (87)..(87): Xaa at this position is a single (one, 1) amino acid selected from the following options: His Arg Cys
  MISC_FEATURE (90)..(90): Xaa at this position is a single (one, 1) amino acid selected from the following options: Lys Asn
  MISC_FEATURE (92)..(92): Xaa at this position is a single (one, 1) amino acid selected from the following options: Ile Met
  MISC_FEATURE (94)..(94): Xaa at this position is a single (one, 1) amino acid selected from the following options: Arg Glu
  MISC_FEATURE (98)..(98): Xaa at this position is a single (one, 1) amino acid selected from the following options: Ser Lys Leu
  MISC_FEATURE (99)..(99): Xaa at this position is a single (one, 1) amino acid selected from the following options: Ile Val
  MISC_FEATURE (101)..(101): Xaa at this position is a single (one, 1) amino acid selected from the following options: Lys Met
  MISC_FEATURE (104)..(104): Xaa at this position is a single (one, 1) amino acid selected from the following options: His Gln
  MISC_FEATURE (105)..(105): Xaa at this position is a single (one, 1) amino acid selected from the following options: Asp His
  MISC_FEATURE (107)..(107): Asp or is absent (no amino acid at this position and so this position is not present)
  MISC_FEATURE (108)..(108): Asp or is absent (no amino acid at this position and so this position is not present)
MAXXXLXAXXXXXXXXXXXXQXXXXXSXXXXXXXXXXXXXXXAGXXFXKXEXAXXXRYXRAXXXEQLAXLKKXHEXEIXHXXKEIEXLQXEXEXHKQXXKXLKXXDXX

SEQ ID NO: 10 - protein, 108 aa, Artificial Sequence
  Designed; as detailed elsewhere in present application
  MISC_FEATURE (16)..(16): Xaa at this position is a single (one, 1) amino acid selected from the following options: Gly Ser
  MISC_FEATURE (18)..(18): Xaa at this position is a single (one, 1) amino acid selected from the following options: Trp Arg
  MISC_FEATURE (19)..(19): Xaa at this position is a single (one, 1) amino acid selected from the following options: Ala Thr
  MISC_FEATURE (22)..(22): Xaa at this position is a single (one, 1) amino acid selected from the following options: Gly Ala
  MISC_FEATURE (23)..(23): Xaa at this position is a single (one, 1) amino acid selected from the following options: Arg Gln
  MISC_FEATURE (26)..(26): Xaa at this position is a single (one, 1) amino acid selected from the following options: Gly Ser
  MISC_FEATURE (28)..(28): Xaa at this position is a single (one, 1) amino acid selected from the following options: Glu Asp
  MISC_FEATURE (29)..(29): Xaa at this position is a single (one, 1) amino acid selected from the following options: Ser Gln
  MISC_FEATURE (30)..(30): Xaa at this position is a single (one, 1) amino acid selected from the following options: Ala Ser
  MISC_FEATURE (31)..(31): Xaa at this position is a single (one, 1) amino acid selected from the following options: Asp Glu
  MISC_FEATURE (32)..(32): Xaa at this position is a single (one, 1) amino acid selected from the following options: Asn Asp
  MISC_FEATURE (34)..(34): Xaa at this position is a single (one, 1) amino acid selected from the following options: Gly Asp
  MISC_FEATURE (35)..(35): Xaa at this position is a single (one, 1) amino acid selected from the following options: Ser Arg
  MISC_FEATURE (36)..(36): Xaa at this position is a single (one, 1) amino acid selected from the following options: Ser Gly
  MISC_FEATURE (39)..(39): Xaa at this position is a single (one, 1) amino acid selected from the following options: Ala Ser
  MISC_FEATURE (40)..(40): Xaa at this position is a single (one, 1) amino acid selected from the following options: Val Ile
  MISC_FEATURE (41)..(41): Xaa at this position is a single (one, 1) amino acid selected from the following options: Arg Trp
  MISC_FEATURE (42)..(42): Xaa at this position is a single (one, 1) amino acid selected from the following options: Asp Glu
  MISC_FEATURE (45)..(45): Xaa at this position is a single (one, 1) amino acid selected from the following options: Gly Val
  MISC_FEATURE (46)..(46): Xaa at this position is a single (one, 1) amino acid selected from the following options: Ala Asp
  MISC_FEATURE (48)..(48): Xaa at this position is a single (one, 1) amino acid selected from the following options: Gly Ala
  MISC_FEATURE (50)..(50): Xaa at this position is a single (one, 1) amino acid selected from the following options: Arg Lys
  MISC_FEATURE (52)..(52): Xaa at this position is a single (one, 1) amino acid selected from the following options: Gln Ala
  MISC_FEATURE (54)..(54): Xaa at this position is a single (one, 1) amino acid selected from the following options: Glu Lys
  MISC_FEATURE (55)..(55): Xaa at this position is a single (one, 1) amino acid selected from the following options: Glu Gly
  MISC_FEATURE (56)..(56): Xaa at this position is a single (one, 1) amino acid selected from the following options: Glu Gln
  MISC_FEATURE (59)..(59): Xaa at this position is a single (one, 1) amino acid selected from the following options: Phe Leu
  MISC_FEATURE (62)..(62): Xaa at this position is a single (one, 1) amino acid selected from the following options: Arg Gln
  MISC_FEATURE (63)..(63): Xaa at this position is a single (one, 1) amino acid selected from the following options: Ala Ser
  MISC_FEATURE (64)..(64): Xaa at this position is a single (one, 1) amino acid selected from the following options: Lys Arg
  MISC_FEATURE (73)..(73): Xaa at this position is a single (one, 1) amino acid selected from the following options: His Tyr
  MISC_FEATURE (76)..(76): Xaa at this position is a single (one, 1) amino acid selected from the following options: Asn Glu
  MISC_FEATURE (79)..(79): Xaa at this position is a single (one, 1) amino acid selected from the following options: Ser Val
  MISC_FEATURE (82)..(82): Xaa at this position is a single (one, 1) amino acid selected from the following options: Val Lys
  MISC_FEATURE (87)..(87): Xaa at this position is a single (one, 1) amino acid selected from the following options: His Arg
  MISC_FEATURE (98)..(98): Xaa at this position is a single (one, 1) amino acid selected from the following options: Ser Lys
  MISC_FEATURE (101)..(101): Xaa at this position is a single (one, 1) amino acid selected from the following options: Lys Met
  MISC_FEATURE (108)..(108): Asp or is absent (no amino acid at this position and so this position is not present)
MAATALAARTRFGVWXVXXMQXXGFXSXXXXXLXXXAGXXXXAGXXFXKXEXAXXXRYXRAXXXEQLAALKKXHEXEIXHHXKEIEXLQKEIERHKQXIKXLKHDDDX

SEQ ID NO: 11 - protein, 107 aa, Artificial Sequence
  Designed; as detailed elsewhere in present application
  MISC_FEATURE (3)..(3): Xaa at this position is a single (one, 1) amino acid selected from the following options: Ala Val
  MISC_FEATURE (4)..(4): Xaa at this position is a single (one, 1) amino acid selected from the following options: Thr Val
  MISC_FEATURE (7)..(7): Xaa at this position is a single (one, 1) amino acid selected from the following options: Ala Val
  MISC_FEATURE (9)..(9): Xaa at this position is a single (one, 1) amino acid selected from the following options: Arg Trp
  MISC_FEATURE (10)..(10): Xaa at this position is a single (one, 1) amino acid selected from the following options: Thr Met
  MISC_FEATURE (11)..(11): Xaa at this position is a single (one, 1) amino acid selected from the following options: Arg Gln Trp
  MISC_FEATURE (12)..(12): Xaa at this position is a single (one, 1) amino acid selected from the following options: Phe Leu
  MISC_FEATURE (13)..(13): Xaa at this position is a single (one, 1) amino acid selected from the following options: Gly Arg
  MISC_FEATURE (16)..(16): Xaa at this position is a single (one, 1) amino acid selected from the following options: Gly Ser
  MISC_FEATURE (18)..(18): Xaa at this position is a single (one, 1) amino acid selected from the following options: Arg Trp
  MISC_FEATURE (19)..(19): Xaa at this position is a single (one, 1) amino acid selected from the following options: Thr Val Ala
  MISC_FEATURE (22)..(22): Xaa at this position is a single (one, 1) amino acid selected from the following options: Gly Ala
  MISC_FEATURE (23)..(23): Xaa at this position is a single (one, 1) amino acid selected from the following options: Arg Leu
  MISC_FEATURE (28)..(28): Xaa at this position is a single (one, 1) amino acid selected from the following options: Glu Asp
  MISC_FEATURE (29)..(29): Xaa at this position is a single (one, 1) amino acid selected from the following options: Ser Pro Gln
  MISC_FEATURE (30)..(30): Xaa at this position is a single (one, 1) amino acid selected from the following options: Ala Ser
  MISC_FEATURE (31)..(31): Xaa at this position is a single (one, 1) amino acid selected from the following options: Asp Glu
  MISC_FEATURE (33)..(33): Xaa at this position is a single (one, 1) amino acid selected from the following options: Leu Val
  MISC_FEATURE (34)..(34): Xaa at this position is a single (one, 1) amino acid selected from the following options: Gly Asp
  MISC_FEATURE (35)..(35): Xaa at this position is a single (one, 1) amino acid selected from the following options: Ser Arg
  MISC_FEATURE (36)..(36): Xaa at this position is a single (one, 1) amino acid selected from the following options: Ser Gly
  MISC_FEATURE (37)..(37): Xaa at this position is a single (one, 1) amino acid selected from the following options: Ala Glu
  MISC_FEATURE (38)..(38): Xaa at this position is a single (one, 1) amino acid selected from the following options: Gly Ala
  MISC_FEATURE (39)..(39): Xaa at this position is a single (one, 1) amino acid selected from the following options: Thr Ser Ala
  MISC_FEATURE (40)..(40): Xaa at this position is a single (one, 1) amino acid selected from the following options: Trp Val Ile
  MISC_FEATURE (41)..(41): Xaa at this position is a single (one, 1) amino acid selected from the following options: Arg Trp
  MISC_FEATURE (42)..(42): Xaa at this position is a single (one, 1) amino acid selected from the following options: Asn Glu Asp
  MISC_FEATURE (45)..(45): Xaa at this position is a single (one, 1) amino acid selected from the following options: Gly Val
  MISC_FEATURE (46)..(46): Xaa at this position is a single (one, 1) amino acid selected from the following options: Ala Asp
  MISC_FEATURE (48)..(48): Xaa at this position is a single (one, 1) amino acid selected from the following options: Gly Arg
  MISC_FEATURE (50)..(50): Xaa at this position is a single (one, 1) amino acid selected from the following options: Lys Arg
  MISC_FEATURE (54)..(54): Xaa at this position is a single (one, 1) amino acid selected from the following options: Glu Lys
  MISC_FEATURE (55)..(55): Xaa at this position is a single (one, 1) amino acid selected from the following options: Glu Gly
  MISC_FEATURE (59)..(59): Xaa at this position is a single (one, 1) amino acid selected from the following options: Phe Leu
  MISC_FEATURE (62)..(62): Xaa at this position is a single (one, 1) amino acid selected from the following options: Arg Gln
  MISC_FEATURE (63)..(63): Xaa at this position is a single (one, 1) amino acid selected from the following options: Ala Ser
  MISC_FEATURE (64)..(64): Xaa at this position is a single (one, 1) amino acid selected from the following options: Lys Arg
  MISC_FEATURE (76)..(76): Xaa at this position is a single (one, 1) amino acid selected from the following options: Asn Glu
  MISC_FEATURE (79)..(79): Xaa at this position is a single (one, 1) amino acid selected from the following options: Ser Val
  MISC_FEATURE (82)..(82): Xaa at this position is a single (one, 1) amino acid selected from the following options: Val Lys
  MISC_FEATURE (87)..(87): Xaa at this position is a single (one, 1) amino acid selected from the following options: Arg His
  MISC_FEATURE (98)..(98): Xaa at this position is a single (one, 1) amino acid selected from the following options: Lys Ser
  MISC_FEATURE (101)..(101): Xaa at this position is a single (one, 1) amino acid selected from the following options: Met Lys
  MISC_FEATURE (107)..(107): Asp or is absent (no amino acid at this position and so this position is not present)
MAXXALXAXXXXXVWXVXXMQXXGFGSXXXXNXXXXXXXXXXAGXXFXKXEQAXXERYXRAXXXEQLAALKKHHEXEIXHHXKEIEXLQKEIERHKQXIKXLKHDDX

SEQ ID NO: 12 - protein, 107 aa, Balaena mysticetus
MAATALAARTRFGVWSVWAMQGRGFGSESADNLGSSAGAIRDAGGAFGKKEQAEEERYFRARAKEQLAALKKHHENEISHHVKEIEHLQKEIERHKQSIKKLKHDDD

SEQ ID NO: 13 - protein, 107 aa, Artificial Sequence
  Designed; as detailed elsewhere in present application
  MISC_FEATURE (3)..(3): Xaa at this position is a single (one, 1) amino acid selected from the following options: Val Gly Ala Thr
  MISC_FEATURE (4)..(4): Xaa at this position is a single (one, 1) amino acid selected from the following options: Thr Ser Pro
  MISC_FEATURE (5)..(5): Xaa at this position is a single (one, 1) amino acid selected from the following options: Ala Val Glu
  MISC_FEATURE (6)..(6): Xaa at this position is a single (one, 1) amino acid selected from the following options: Leu Thr Gln
  MISC_FEATURE (7)..(7): Xaa at this position is a single (one, 1) amino acid selected from the following options: Ala Val
  MISC_FEATURE (8)..(8): Xaa at this position is a single (one, 1) amino acid selected from the following options: Ala Val Leu Ile Thr
  MISC_FEATURE (9)..(9): Xaa at this position is a single (one, 1) amino acid selected from the following options: Arg Gln Trp
  MISC_FEATURE (10)..(10): Xaa at this position is a single (one, 1) amino acid selected from the following options: Thr Val Met Ala Ser Leu
  MISC_FEATURE (11)..(11): Xaa at this position is a single (one, 1) amino acid selected from the following options: Trp Arg Gln
  MISC_FEATURE (12)..(12): Xaa at this position is a single (one, 1) amino acid selected from the following options: Leu Phe Gln
  MISC_FEATURE (13)..(13): Xaa at this position is a single (one, 1) amino acid selected from the following options: Gly Tyr Cys Ala Arg
  MISC_FEATURE (14)..(14): Xaa at this position is a single (one, 1) amino acid selected from the following options: Val Ser Ala Thr Met Arg
  MISC_FEATURE (15)..(15): Xaa at this position is a single (one, 1) amino acid selected from the following options: Trp Leu
  MISC_FEATURE (16)..(16): Xaa at this position is a single (one, 1) amino acid selected from the following options: Gly Ser
  MISC_FEATURE (17)..(17): Xaa at this position is a single (one, 1) amino acid selected from the following options: Val Ala Met
  MISC_FEATURE (18)..(18): Xaa at this position is a single (one, 1) amino acid selected from the following options: Arg Trp Lys Leu
  MISC_FEATURE (19)..(19): Xaa at this position is a single (one, 1) amino acid selected from the following options: Thr Ala Val Ser
  MISC_FEATURE (20)..(20): Xaa at this position is a single (one, 1) amino acid selected from the following options: Met Leu Ile Arg Val Ala Thr
  MISC_FEATURE (21)..(21): Xaa at this position is a single (one, 1) amino acid selected from the following options: Gln Arg
  MISC_FEATURE (22)..(22): Xaa at this position is a single (one, 1) amino acid selected from the following options: Ala Thr Gly Ser
  MISC_FEATURE (23)..(23): Xaa at this position is a single (one, 1) amino acid selected from the following options: Arg Gln Gly Leu
  MISC_FEATURE (24)..(24): Xaa at this position is a single (one, 1) amino acid selected from the following options: Gly Ser
  MISC_FEATURE (25)..(25): Xaa at this position is a single (one, 1) amino acid selected from the following options: Phe Tyr
MAXXXXXXXXXXXXXXXXXXXXXXXGSESADNLGSSAGAIRDAGGAFGKKEQAEEERYFRARAKEQLAALKKHHENEISHHVKEIEHLQKEIERHKQSIKKLKHDDD

SEQ ID NO: 14 - protein, 107 aa, Artificial Sequence
  Designed; as detailed elsewhere in present application
MAVTALAARTWLGVWGVRTMQARGFGSESADNLGSSAGAIRDAGGAFGKKEQAEEERYFRARAKEQLAALKKHHENEISHHVKEIEHLQKEIERHKQSIKKLKHDDD

SEQ ID NO: 15 - protein, 107 aa, Artificial Sequence
  Designed; as detailed elsewhere in present application
MAGSALAVRARFGVWGMKVLQTRGFGSESADNLGSSAGAIRDAGGAFGKKEQAEEERYFRARAKEQLAALKKHHENEISHHVKEIEHLQKEIERHKQSIKKLKHDDD

SEQ ID NO: 16 - protein, 110 aa, Artificial Sequence
  Encompasses natural & artificial PRT sequences; artificial sequences designed by manual alignment and manipulation (described elsewhere in present application) of some natural IF1 protein sequences
  MISC_FEATURE (3)..(3): Xaa at this position is a single (one, 1) amino acid selected from the following options: Val Gly Ala Thr
  MISC_FEATURE (4)..(4): Xaa at this position is a single (one, 1) amino acid selected from the following options: Thr Ser Pro
  MISC_FEATURE (5)..(5): Xaa at this position is a single (one, 1) amino acid selected from the following options: Glu Ala Val
  MISC_FEATURE (6)..(6): Xaa at this position is a single (one, 1) amino acid selected from the following options: Leu Thr Gln
  MISC_FEATURE (7)..(7): Xaa at this position is a single (one, 1) amino acid selected from the following options: Ala Val
  MISC_FEATURE (8)..(8): Xaa at this position is a single (one, 1) amino acid selected from the following options: Ala Val Leu Ile Thr
  MISC_FEATURE (9)..(9): Xaa at this position is a single (one, 1) amino acid selected from the following options: Trp Arg Gln
  MISC_FEATURE (10)..(10): Xaa at this position is a single (one, 1) amino acid selected from the following options: Thr Val Met Ala Ser Leu
  MISC_FEATURE (11)..(11): Xaa at this position is a single (one, 1) amino acid selected from the following options: Gln Trp Arg
  MISC_FEATURE (12)..(12): Xaa at this position is a single (one, 1) amino acid selected from the following options: Leu Phe Gln
  MISC_FEATURE (13)..(13): Xaa at this position is a single (one, 1) amino acid selected from the following options: Arg Gly Tyr Cys Ala
  MISC_FEATURE (14)..(14): Xaa at this position is a single (one, 1) amino acid selected from the following options: Val Ser Ala Thr Met Arg
  MISC_FEATURE (15)..(15): Xaa at this position is a single (one, 1) amino acid selected from the following options: Trp Leu
  MISC_FEATURE (16)..(16): Xaa at this position is a single (one, 1) amino acid selected from the following options: Gly Ser
  MISC_FEATURE (17)..(17): Xaa at this position is a single (one, 1) amino acid selected from the following options: Val Ala Met
  MISC_FEATURE (18)..(18): Xaa at this position is a single (one, 1) amino acid selected from the following options: Arg Trp Lys Leu
  MISC_FEATURE (19)..(19): Xaa at this position is a single (one, 1) amino acid selected from the following options: Thr Ala Val Ser
  MISC_FEATURE (20)..(20): Xaa at this position is a single (one, 1) amino acid selected from the following options: Met Leu Ile Arg Val Ala Thr
  MISC_FEATURE (21)..(21): Xaa at this position is a single (one, 1) amino acid selected from the following options: Gln Arg
  MISC_FEATURE (22)..(22): Xaa at this position is a single (one, 1) amino acid selected from the following options: Ala Thr Gly Ser
  MISC_FEATURE (23)..(23): Xaa at this position is a single (one, 1) amino acid selected from the following options: Leu Arg Gln Gly
  MISC_FEATURE (24)..(24): Xaa at this position is a single (one, 1) amino acid selected from the following options: Gly Ser
  MISC_FEATURE (25)..(25): Xaa at this position is a single (one, 1) amino acid selected from the following options: Phe Tyr
  MISC_FEATURE (26)..(26): Xaa at this position is a single (one, 1) amino acid selected from the following options: Gly Ser Val Ala Thr Leu Arg Phe Ile Lys Met Gln Asn
  MISC_FEATURE (27)..(27): Xaa at this position is a single (one, 1) amino acid selected from the following options: Ser Cys Arg Gly Phe Thr Pro
  MISC_FEATURE (28)..(28): Xaa at this position is a single (one, 1) amino acid selected from the following options: Asp Glu Gly Ser Phe Lys Thr Leu Phe Pro
  MISC_FEATURE (29)..(29): Xaa at this position is a single (one, 1) amino acid selected from the following options: Pro Gln Arg Ser Thr Lys Gly Glu Ala Phe
  MISC_FEATURE (30)..(30): Xaa at this position is a single (one, 1) amino acid selected from the following options: Ser Pro Ala Gly Arg Glu Asp Val
  MISC_FEATURE (31)..(31): Xaa at this position is a single (one, 1) amino acid selected from the following options: Glu Asp Lys His Ala Gly Asn Ser Arg Gln Asp Thr Leu Val
  MISC_FEATURE (32)..(32): Xaa at this position is a single (one, 1) amino acid selected from the following options: Asn Asp Tyr Ser Gly Arg His Lys Glu Ala Leu
  MISC_FEATURE (33)..(33): Xaa at this position is a single (one, 1) amino acid selected from the following options: Val Leu Pro His Met Ile Phe Thr Gly Gly Ser Asp Glu Phe
  MISC_FEATURE (34)..(34): Xaa at this position is a single (one, 1) amino acid selected from the following options: Asp Gly His Arg Ser Glu Pro
  MISC_FEATURE (35)..(35): Xaa at this position is a single (one, 1) amino acid selected from the following options: Arg Ser Gly Thr Pro Ala Lys Glu
  MISC_FEATURE (36)..(36): Xaa at this position is a single (one, 1) amino acid selected from the following options: Arg Thr Gly Ser Arg Pro Lys Asp Ala
  MISC_FEATURE (37)..(37): Xaa at this position is a single (one, 1) amino acid selected from the following options: Ala Glu Ser Gly Arg
  MISC_FEATURE (38)..(38): Xaa at this position is a single (one, 1) amino acid selected from the following options: Ala Gly Gln Pro
  MISC_FEATURE (39)..(39): Xaa at this position is a single (one, 1) amino acid selected from the following options: Thr Ser Ala Arg
  MISC_FEATURE (40)..(40): Xaa at this position is a single (one, 1) amino acid selected from the following options: Ile Val Leu Glu Phe
  MISC_FEATURE (41)..(41): Xaa at this position is a single (one, 1) amino acid selected from the following options: Trp Arg Lys Glu Thr Tyr
  MISC_FEATURE (42)..(42): Xaa at this position is a single (one, 1) amino acid selected from the following options: Asn Glu Asp Ala Lys Ser
  MISC_FEATURE (43)..(43): Xaa at this position is a single (one, 1) amino acid selected from the following options: Ala Arg Lys Cys
  MISC_FEATURE (44)..(44): Xaa at this position is a single (one, 1) amino acid selected from the following options: Gly Tyr Glu Pro
  MISC_FEATURE (45)..(45): Xaa at this position is a single (one, 1) amino acid selected from the following options: Val Gly Phe Lys Arg
  MISC_FEATURE (46)..(46): Xaa at this position is a single (one, 1) amino acid selected from the following options: Asp Ala Ser Arg Leu
  MISC_FEATURE (47)..(47): Xaa at this position is a single (one, 1) amino acid selected from the following options: Phe Leu Ile Glu Ser
  MISC_FEATURE (48)..(48): Xaa at this position is a single (one, 1) amino acid selected from the following options: Arg Gly Ala Ile Glu Ser Pro
  MISC_FEATURE (49)..(49): Xaa at this position is a single (one, 1) amino acid selected from the following options: Lys Arg Thr Glu Gln
  MISC_FEATURE (50)..(50): Xaa at this position is a single (one, 1) amino acid selected from the following options: Arg Lys Met
  MISC_FEATURE (51)..(51): Xaa at this position is a single (one, 1) amino acid selected from the following options: Glu Ser Gln Ala Thr Tyr
  MISC_FEATURE (52)..(52): Xaa at this position is a single (one, 1) amino acid selected from the following options: Gln Ala Lys Arg Pro Phe Val
  MISC_FEATURE (53)..(53): Xaa at this position is a single (one, 1) amino acid selected from the following options: Ala Ser Arg
  MISC_FEATURE (54)..(54): Xaa at this position is a single (one, 1) amino acid selected from the following options: Lys Glu Asp His Ala Ile
  MISC_FEATURE (55)..(55): Xaa at this position is a single (one, 1) amino acid selected from the following options: Gly Glu Pro Arg
  MISC_FEATURE (56)..(56): Xaa at this position is a single (one, 1) amino acid selected from the following options: Glu Asp Tyr Thr Gln
  MISC_FEATURE (57)..(57): Xaa at this position is a single (one, 1) amino acid selected from the following options: Arg Met Lys
  MISC_FEATURE (58)..(58): Xaa at this position is a single (one, 1) amino acid selected from the following options: Tyr Phe Glu
  MISC_FEATURE (59)..(59): Xaa at this position is a single (one, 1) amino acid selected from the following options: Leu Phe Pro Gln
  MISC_FEATURE (60)..(60): Xaa at this position is a single (one, 1) amino acid selected from the following options: Arg Leu Lys
  MISC_FEATURE (61)..(61): Xaa at this position is a single (one, 1) amino acid selected from the following options: Ala Lys Glu Thr Asp Gln Arg
  MISC_FEATURE (62)..(62): Xaa at this position is a single (one, 1) amino acid selected from the following options: Gln Arg Lys Ala Cys
  MISC_FEATURE (63)..(63): Xaa at this position is a single (one, 1) amino acid selected from the following options: Ser Thr Ala Asn Glu Leu
  MISC_FEATURE (64)..(64): Xaa at this position is a single (one, 1) amino acid selected from the following options: Arg Lys Gln His Ala
  MISC_FEATURE (65)..(65): Xaa at this position is a single (one, 1) amino acid selected from the following options: Glu Gln Lys
  MISC_FEATURE (66)..(66): Xaa at this position is a single (one, 1) amino acid selected from the following options: Gln Lys
  MISC_FEATURE (67)..(67): Xaa at this position is a single (one, 1) amino acid selected from the following options: Leu His Met Glu
  MISC_FEATURE (68)..(68): Xaa at this position is a single (one, 1) amino acid selected from the following options: Ala Leu Glu Thr Asp Ser
  MISC_FEATURE (69)..(69): Xaa at this position is a single (one, 1) amino acid selected from the following options: Ala Thr Arg Ile Ser Asn Val Met Asp
  MISC_FEATURE (70)..(70): Xaa at this position is a single (one, 1) amino acid selected from the following options: Leu Glu
  MISC_FEATURE (71)..(71): Xaa at this position is a single (one, 1) amino acid selected from the following options: Lys Arg Ile
  MISC_FEATURE (72)..(72): Xaa at this position is a single (one, 1) amino acid selected from the following options: Lys Asn Arg Thr Glu
  MISC_FEATURE (73)..(73): Xaa at this position is a single (one, 1) amino acid selected from the following options: His Tyr
  MISC_FEATURE (75)..(75): Xaa at this position is a single (one, 1) amino acid selected from the following options: Glu Gln Lys Val
  MISC_FEATURE (76)..(76): Xaa at this position is a single (one, 1) amino acid selected from the following options: Glu Asp Asn Lys
  MISC_FEATURE (77)..(77): Xaa at this position is a single (one, 1) amino acid selected from the following options: Glu Val
  MISC_FEATURE (78)..(78): Xaa at this position is a single (one, 1) amino acid selected from the following options: Ile Val
  MISC_FEATURE (79)..(79): Xaa at this position is a single (one, 1) amino acid selected from the following options: Val Thr Ser Asp Asn Gly Ala Glu Gln Tyr Arg
  MISC_FEATURE (80)..(80): Xaa at this position is a single (one, 1) amino acid selected from the following options: His Val Tyr Ala
  MISC_FEATURE (81)..(81): Xaa at this position is a single (one, 1) amino acid selected from the following options: His Ser Thr Leu
  MISC_FEATURE (82)..(82): Xaa at this position is a single (one, 1) amino acid selected from the following options: Lys Ser Met Val His Ala Arg Gln Glu Ile Leu Val
  MISC_FEATURE (83)..(83): Xaa at this position is a single (one, 1) amino acid selected from the following options: Lys Glu Gln Arg Gly
  MISC_FEATURE (84)..(84): Xaa at this position is a single (one, 1) amino acid selected from the following options: Glu Ala Gln
  MISC_FEATURE (86)..(86): Xaa at this position is a single (one, 1) amino acid selected from the following options: Glu Lys Asp Gln
  MISC_FEATURE (87)..(87): Xaa at this position is a single (one, 1) amino acid selected from the following options: Arg His Leu Gln Cys Val Gln
  MISC_FEATURE (88)..(88): Xaa at this position is a single (one, 1) amino acid selected from the following options: Leu Met
  MISC_FEATURE (89)..(89): Xaa at this position is a single (one, 1) amino acid selected from the following options: Gln Glu Lys
  MISC_FEATURE (90)..(90): Xaa at this position is a single (one, 1) amino acid selected from the following options: Lys Asn Arg Gln
  MISC_FEATURE (91)..(91): Xaa at this position is a single (one, 1) amino acid selected from the following options: Glu Gln Asn
  MISC_FEATURE (92)..(92): Xaa at this position is a single (one, 1) amino acid selected from the following options: Ile Met
  MISC_FEATURE (93)..(93): Xaa at this position is a single (one, 1) amino acid selected from the following options: Glu Gln Asp Ile Lys
  MISC_FEATURE (94)..(94): Xaa at this position is a single (one, 1) amino acid selected from the following options: Arg Gln Lys Glu
  MISC_FEATURE (95)..(95): Xaa at this position is a single (one, 1) amino acid selected from the following options: His Leu Ile
  MISC_FEATURE (96)..(96): Xaa at this position is a single (one, 1) amino acid selected from the following options: Lys Gln Glu
  MISC_FEATURE (97)..(97): Xaa at this position is a single (one, 1) amino acid selected from the following options: Gln Lys Glu Tyr Gly Ser His Asp Asn
  MISC_FEATURE (98)..(98): Xaa at this position is a single (one, 1) amino acid selected from the following options: Lys Arg Ser Ala Asn Thr His Ser Leu
  MISC_FEATURE (99)..(99): Xaa at this position is a single (one, 1) amino acid selected from the following options: Ile Met Asp Val
  MISC_FEATURE (100)..(100): Xaa at this position is a single (one, 1) amino acid selected from the following options: Lys Gln Arg Asn
  MISC_FEATURE (101)..(101): Xaa at this position is a single (one, 1) amino acid selected from the following options: Met Thr Lys His Tyr Ser Gln Ile Val Asn Asp Arg
  MISC_FEATURE (103)..(103): Xaa at this position is a single (one, 1) amino acid selected from the following options: Lys Asn Ser His Arg Thr Gly
  MISC_FEATURE (104)..(104): Xaa at this position is a single (one, 1) amino acid selected from the following options: His Asp Asn Ser Arg Gln Glu Tyr Asn Leu Gln Gly
  MISC_FEATURE (105)..(105): Xaa at this position is a single (one, 1) amino acid selected from the following options: Asp His Ser Asn Ile or is absent (no amino acid at this position and so this position is not present)
  MISC_FEATURE (106)..(106): Xaa at this position is a single (one, 1) amino acid selected from the following options: Asp Glu His Gly Asn or is absent (no amino acid at this position and so this position is not present)
  MISC_FEATURE (107)..(107): Xaa at this position is a single (one, 1) amino acid selected from the following options: Asp His or is absent (no amino acid at this position and so this position is not present)
  MISC_FEATURE (108)..(108): Xaa at this position is a single (one, 1) amino acid selected from the following options: Asp Glu or is absent (no amino acid at this position and so this position is not present)
  MISC_FEATURE (109)..(109): Asp or is absent (no amino acid at this position and so this position is not present)
  MISC_FEATURE (110)..(110): Asp or is absent (no amino acid at this position and so this position is not present)
MAXXXXXXXXXXXXXXXXXXXXXXXXXXXXXXXXXXXXXXXXXXXXXXXXXXXXXXXXXXXXXXXXXXXXXXXHXXXXXXXXXXIXXXXXXXXXXXXXXXXLXXXXXXXX

SEQ ID NO: 17 - protein, 108 aa, Artificial Sequence
  Designed; as detailed elsewhere in present application
  MISC_FEATURE (3)..(3): Xaa at this position is a single (one, 1) amino acid selected from the following options: Val Gly Ala Thr
  MISC_FEATURE (4)..(4): Xaa at this position is a single (one, 1) amino acid selected from the following options: Thr Ser Pro
  MISC_FEATURE (5)..(5): Xaa at this position is a single (one, 1) amino acid selected from the following options: Ala Val Glu
  MISC_FEATURE (6)..(6): Xaa at this position is a single (one, 1) amino acid selected from the following options: Leu Thr Gln
  MISC_FEATURE (7)..(7): Xaa at this position is a single (one, 1) amino acid selected from the following options: Ala Val
  MISC_FEATURE (8)..(8): Xaa at this position is a single (one, 1) amino acid selected from the following options: Ala Val Leu Ile Thr
  MISC_FEATURE (9)..(9): Xaa at this position is a single (one, 1) amino acid selected from the following options: Arg Gln Trp
  MISC_FEATURE (10)..(10): Xaa at this position is a single (one, 1) amino acid selected from the following options: Thr Val Met Ala Ser Leu
  MISC_FEATURE (11)..(11): Xaa at this position is a single (one, 1) amino acid selected from the following options: Trp Arg Gln
  MISC_FEATURE (12)..(12): Xaa at this position is a single (one, 1) amino acid selected from the following options: Leu Phe Gln
  MISC_FEATURE (13)..(13): Xaa at this position is a single (one, 1) amino acid selected from the following options: Gly Tyr Cys Ala Arg
  MISC_FEATURE (14)..(14): Xaa at this position is a single (one, 1) amino acid selected from the following options: Val Ser Ala Thr Met Arg
  MISC_FEATURE (15)..(15): Xaa at this position is a single (one, 1) amino acid selected from the following options: Trp Leu
  MISC_FEATURE (16)..(16): Xaa at this position is a single (one, 1) amino acid selected from the following options: Gly Ser
  MISC_FEATURE (17)..(17): Xaa at this position is a single (one, 1) amino acid selected from the following options: Val Ala Met
  MISC_FEATURE (18)..(18): Xaa at this position is a single (one, 1) amino acid selected from the following options: Arg Trp Lys Leu
  MISC_FEATURE (19)..(19): Xaa at this position is a single (one, 1) amino acid selected from the following options: Thr Ala Val Ser
  MISC_FEATURE (20)..(20): Xaa at this position is a single (one, 1) amino acid selected from the following options: Met Leu Ile Arg Val Ala Thr
  MISC_FEATURE (21)..(21): Xaa at this position is a single (one, 1) amino acid selected from the following options: Gln Arg
  MISC_FEATURE (22)..(22): Xaa at this position is a single (one, 1) amino acid selected from the following options: Ala Thr Gly Ser
  MISC_FEATURE (23)..(23): Xaa at this position is a single (one, 1) amino acid selected from the following options: Arg Gln Gly Leu
  MISC_FEATURE (24)..(24): Xaa at this position is a single (one, 1) amino acid selected from the following options: Gly Ser
  MISC_FEATURE (25)..(25): Xaa at this position is a single (one, 1) amino acid selected from the following options: Phe Tyr
  MISC_FEATURE (26)..(26): Xaa at this position is a single (one, 1) amino acid selected from the following options: Gly Leu
  MISC_FEATURE (27)..(27): Xaa at this position is a single (one, 1) amino acid selected from the following options: Ser Gly
  MISC_FEATURE (28)..(28): Xaa at this position is a single (one, 1) amino acid selected from the following options: Glu Asp Ser
  MISC_FEATURE (29)..(29): Xaa at this position is a single (one, 1) amino acid selected from the following options: Gly Ser Gln Pro
  MISC_FEATURE (30)..(30): Xaa at this position is a single (one, 1) amino acid selected from the following options: Ala Ser
  MISC_FEATURE (31)..(31): Xaa at this position is a single (one, 1) amino acid selected from the following options: Asp Gly Glu
  MISC_FEATURE (32)..(32): Xaa at this position is a single (one, 1) amino acid selected from the following options: Asn Lys
  MISC_FEATURE (33)..(33): Xaa at this position is a single (one, 1) amino acid selected from the following options: Leu Gly Val
  MISC_FEATURE (34)..(34): Xaa at this position is a single (one, 1) amino acid selected from the following options: Gly Asp
  MISC_FEATURE (35)..(35): Xaa at this position is a single (one, 1) amino acid selected from the following options: Ser Gly Arg
  MISC_FEATURE (36)..(36): Xaa at this position is a single (one, 1) amino acid selected from the following options: Ser Gly
  MISC_FEATURE (37)..(37): Xaa at this position is a single (one, 1) amino acid selected from the following options: Ala Gly Glu
  MISC_FEATURE (38)..(38): Xaa at this position is a single (one, 1) amino acid selected from the following options: Gly Ala
  MISC_FEATURE (39)..(39): Xaa at this position is a single (one, 1) amino acid selected from the following options: Ser Ala Thr
  MISC_FEATURE (40)..(40): Xaa at this position is a single (one, 1) amino acid selected from the following options: Ile Val
  MISC_FEATURE (41)..(41): Xaa at this position is a single (one, 1) amino acid selected from the following options: Arg Trp
  MISC_FEATURE (42)..(42): Xaa at this position is a single (one, 1) amino acid selected from the following options: Asp Glu Asn
  MISC_FEATURE (45)..(45): Xaa at this position is a single (one, 1) amino acid selected from the following options: Gly Val
  MISC_FEATURE (46)..(46): Xaa at this position is a single (one, 1) amino acid selected from the following options: Ala Asp
  MISC_FEATURE (48)..(48): Xaa at this position is a single (one, 1) amino acid selected from the following options: Gly Arg
  MISC_FEATURE (50)..(50): Xaa at this position is a single (one, 1) amino acid selected from the following options: Lys Arg
  MISC_FEATURE (51)..(51): Xaa at this position is a single (one, 1) amino acid selected from the following options: Glu Gln
  MISC_FEATURE (52)..(52): Xaa at this position is a single (one, 1) amino acid selected from the following options: Gln Ala
  MISC_FEATURE (54)..(54): Xaa at this position is a single (one, 1) amino acid selected from the following options: Glu His Lys
  MISC_FEATURE (55)..(55): Xaa at this position is a single (one, 1) amino acid selected from the following options: Glu Gly
  MISC_FEATURE (59)..(59): Xaa at this position is a single (one, 1) amino acid selected from the following options: Phe Leu
  MISC_FEATURE (61)..(61): Xaa at this position is a single (one, 1) amino acid selected from the following options: Ala Glu Asp
  MISC_FEATURE (62)..(62): Xaa at this position is a single (one, 1) amino acid selected from the following options: Arg Lys Gln
  MISC_FEATURE (63)..(63): Xaa at this position is a single (one, 1) amino acid selected from the following options: Ala Glu Ser
  MISC_FEATURE (64)..(64): Xaa at this position is a single (one, 1) amino acid selected from the following options: Lys Arg
  MISC_FEATURE (69)..(69): Xaa at this position is a single (one, 1) amino acid selected from the following options: Ala Ser
  MISC_FEATURE (71)..(71): Xaa at this position is a single (one, 1) amino acid selected from the following options: Lys Arg
  MISC_FEATURE (72)..(72): Xaa at this position is a single (one, 1) amino acid selected from the following options: Lys Glu
  MISC_FEATURE (73)..(73): Xaa at this position is a single (one, 1) amino acid selected from the following options: His Tyr
  MISC_FEATURE (76)..(76): Xaa at this position is a single (one, 1) amino acid selected from the following options: Glu Asn
  MISC_FEATURE (79)..(79): Xaa at this position is a single (one, 1) amino acid selected from the following options: Ser Asp Val
  MISC_FEATURE (82)..(82): Xaa at this position is a single (one, 1) amino acid selected from the following options: Lys Val
  MISC_FEATURE (86)..(86): Xaa at this position is a single (one, 1) amino acid selected from the following options: Glu Gln
  MISC_FEATURE (87)..(87): Xaa at this position is a single (one, 1) amino acid selected from the following options: His Arg
  MISC_FEATURE (93)..(93): Xaa at this position is a single (one, 1) amino acid selected from the following options: Glu Asp
  MISC_FEATURE (97)..(97): Xaa at this position is a single (one, 1) amino acid selected from the following options: Gln Asn
  MISC_FEATURE (98)..(98): Xaa at this position is a single (one, 1) amino acid selected from the following options: Ser Lys
  MISC_FEATURE (101)..(101): Xaa at this position is a single (one, 1) amino acid selected from the following options: Lys Met
  MISC_FEATURE (104)..(104): Xaa at this position is a single (one, 1) amino acid selected from the following options: His Gly
  MISC_FEATURE (107)..(107): Asp or is absent (no amino acid at this position and so this position is not present)
  MISC_FEATURE (108)..(108): Asp or is absent (no amino acid at this position and so this position is not present)
MAXXXXXXXXXXXXXXXXXXXXXXXXXXXXXXXXXXXXXXXXAGXXFXKXXXAXXERYXRXXXXEQLAXLXXXHEXEIXHHXKEIXXLQKEIXRHKXXIKXLKXDDXX

SEQ ID NO: 18 - protein, 108 aa, Artificial Sequence
  Designed; as detailed elsewhere in present application
  MISC_FEATURE (3)..(3): Xaa at this position is a single (one, 1) amino acid selected from the following options: Val Gly Ala Thr
  MISC_FEATURE (4)..(4): Xaa at this position is a single (one, 1) amino acid selected from the following options: Thr Ser Pro
  MISC_FEATURE (5)..(5): Xaa at this position is a single (one, 1) amino acid selected from the following options: Ala Val Glu
  MISC_FEATURE (6)..(6): Xaa at this position is a single (one, 1) amino acid selected from the following options: Leu Thr Gln
  MISC_FEATURE (7)..(7): Xaa at this position is a single (one, 1) amino acid selected from the following options: Ala Val
  MISC_FEATURE (8)..(8): Xaa at this position is a single (one, 1) amino acid selected from the following options: Ala Val Leu Ile Thr
  MISC_FEATURE (9)..(9): Xaa at this position is a single (one, 1) amino acid selected from the following options: Arg Gln Trp
  MISC_FEATURE (10)..(10): Xaa at this position is a single (one, 1) amino acid selected from the following options: Thr Val Met Ala Ser Leu
  MISC_FEATURE (11)..(11): Xaa at this position is a single (one, 1) amino acid selected from the following options: Trp Arg Gln
  MISC_FEATURE (12)..(12): Xaa at this position is a single (one, 1) amino acid selected from the following options: Leu Phe Gln
  MISC_FEATURE (13)..(13): Xaa at this position is a single (one, 1) amino acid selected from the following options: Gly Tyr Cys Ala Arg
  MISC_FEATURE (14)..(14): Xaa at this position is a single (one, 1) amino acid selected from the following options: Val Ser Ala Thr Met Arg
  MISC_FEATURE (15)..(15): Xaa at this position is a single (one, 1) amino acid selected from the following options: Trp Leu
  MISC_FEATURE (16)..(16): Xaa at this position is a single (one, 1) amino acid selected from the following options: Gly Ser
  MISC_FEATURE (17)..(17): Xaa at this position is a single (one, 1) amino acid selected from the following options: Val Ala Met
  MISC_FEATURE (18)..(18): Xaa at this position is a single (one, 1) amino acid selected from the following options: Arg Trp Lys Leu
  MISC_FEATURE (19)..(19): Xaa at this position is a single (one, 1) amino acid selected from the following options: Thr Ala Val Ser
  MISC_FEATURE (20)..(20): Xaa at this position is a single (one, 1) amino acid selected from the following options: Met Leu Ile Arg Val Ala Thr
  MISC_FEATURE (21)..(21): Xaa at this position is a single (one, 1) amino acid selected from the following options: Gln Arg
  MISC_FEATURE (22)..(22): Xaa at this position is a single (one, 1) amino acid selected from the following options: Ala Thr Gly Ser
  MISC_FEATURE (23)..(23): Xaa at this position is a single (one, 1) amino acid selected from the following options: Arg Gln Gly Leu
  MISC_FEATURE (24)..(24): Xaa at this position is a single (one, 1) amino acid selected from the following options: Gly Ser
  MISC_FEATURE (25)..(25): Xaa at this position is a single (one, 1) amino acid selected from the following options: Phe Tyr
  MISC_FEATURE (26)..(26): Xaa at this position is a single (one, 1) amino acid selected from the following options: Gly Leu
  MISC_FEATURE (27)..(27): Xaa at this position is a single (one, 1) amino acid selected from the following options: Ser Gly
  MISC_FEATURE (28)..(28): Xaa at this position is a single (one, 1) amino acid selected from the following options: Glu Asp
  MISC_FEATURE (29)..(29): Xaa at this position is a single (one, 1) amino acid selected from the following options: Gly Ser
  MISC_FEATURE (30)..(30): Xaa at this position is a single (one, 1) amino acid selected from the following options: Ala Ser
  MISC_FEATURE (31)..(31): Xaa at this position is a single (one, 1) amino acid selected from the following options: Asp Gly
  MISC_FEATURE (32)..(32): Xaa at this position is a single (one, 1) amino acid selected from the following options: Asn Lys
  MISC_FEATURE (33)..(33): Xaa at this position is a single (one, 1) amino acid selected from the following options: Leu Gly
  MISC_FEATURE (34)..(34): Xaa at this position is a single (one, 1) amino acid selected from the following options: Gly Asp
  MISC_FEATURE (35)..(35): Xaa at this position is a single (one, 1) amino acid selected from the following options: Ser Gly
  MISC_FEATURE (36)..(36): Xaa at this position is a single (one, 1) amino acid selected from the following options: Ser Gly
  MISC_FEATURE (37)..(37): Xaa at this position is a single (one, 1) amino acid selected from the following options: Ala Gly
  MISC_FEATURE (38)..(38): Xaa at this position is a single (one, 1) amino acid selected from the following options: Gly Ala
  MISC_FEATURE (39)..(39): Xaa at this position is a single (one, 1) amino acid selected from the following options: Ser Ala
  MISC_FEATURE (40)..(40): Xaa at this position is a single (one, 1) amino acid selected from the following options: Ile Val
  MISC_FEATURE (41)..(41): Xaa at this position is a single (one, 1) amino acid selected from the following options: Arg Trp
  MISC_FEATURE (42)..(42): Xaa at this position is a single (one, 1) amino acid selected from the following options: Asp Glu
  MISC_FEATURE (50)..(50): Xaa at this position is a single (one, 1) amino acid selected from the following options: Lys Arg
  MISC_FEATURE (51)..(51): Xaa at this position is a single (one, 1) amino acid selected from the following options: Glu Gln
  MISC_FEATURE (52)..(52): Xaa at this position is a single (one, 1) amino acid selected from the following options: Gln Ala
  MISC_FEATURE (54)..(54): Xaa at this position is a single (one, 1) amino acid selected from the following options: Glu His
  MISC_FEATURE (59)..(59): Xaa at this position is a single (one, 1) amino acid selected from the following options: Phe Leu
  MISC_FEATURE (61)..(61): Xaa at this position is a single (one, 1) amino acid selected from the following options: Ala Glu
  MISC_FEATURE (62)..(62): Xaa at this position is a single (one, 1) amino acid selected from the following options: Arg Lys
  MISC_FEATURE (63)..(63): Xaa at this position is a single (one, 1) amino acid selected from the following options: Ala Glu
  MISC_FEATURE (64)..(64): Xaa at this position is a single (one, 1) amino acid selected from the following options: Lys Arg
  MISC_FEATURE (69)..(69): Xaa at this position is a single (one, 1) amino acid selected from the following options: Ala Ser
  MISC_FEATURE (71)..(71): Xaa at this position is a single (one, 1) amino acid selected from the following options: Lys Arg
  MISC_FEATURE (72)..(72): Xaa at this position is a single (one, 1) amino acid selected from the following options: Lys Glu
  MISC_FEATURE (76)..(76): Xaa at this position is a single (one, 1) amino acid selected from the following options: Glu Asn
  MISC_FEATURE (79)..(79): Xaa at this position is a single (one, 1) amino acid selected from the following options: Ser Asp
  MISC_FEATURE (82)..(82): Xaa at this position is a single (one, 1) amino acid selected from the following options: Lys Val
  MISC_FEATURE (86)..(86): Xaa at this position is a single (one, 1) amino acid selected from the following options: Glu Gln
  MISC_FEATURE (87)..(87): Xaa at this position is a single (one, 1) amino acid selected from the following options: His Arg
  MISC_FEATURE (93)..(93): Xaa at this position is a single (one, 1) amino acid selected from the following options: Glu Asp
  MISC_FEATURE (97)..(97): Xaa at this position is a single (one, 1) amino acid selected from the following options: Gln Asn
  MISC_FEATURE (98)..(98): Xaa at this position is a single (one, 1) amino acid selected from the following options: Ser Lys
  MISC_FEATURE (104)..(104): Xaa at this position is a single (one, 1) amino acid selected from the following options: His Gly
  MISC_FEATURE (108)..(108): Asp or is absent (no amino acid at this position and so this position is not present)
MAXXXXXXXXXXXXXXXXXXXXXXXXXXXXXXXXXXXXXXXXAGGAFGKXXXAXEERYXRXXXXEQLAXLXXHHEXEIXHHXKEIXXLQKEIXRHKXXIKKLKXDDDX

SEQ ID NO: 19 - protein, 108 aa, Artificial Sequence
  Designed; as detailed elsewhere in present application
  MISC_FEATURE (26)..(26): Xaa at this position is a single (one, 1) amino acid selected from the following options: Gly Leu
  MISC_FEATURE (27)..(27): Xaa at this position is a single (one, 1) amino acid selected from the following options: Ser Gly
  MISC_FEATURE (28)..(28): Xaa at this position is a single (one, 1) amino acid selected from the following options: Glu Asp
  MISC_FEATURE (29)..(29): Xaa at this position is a single (one, 1) amino acid selected from the following options: Gly Ser
  MISC_FEATURE (30)..(30): Xaa at this position is a single (one, 1) amino acid selected from the following options: Ala Ser
  MISC_FEATURE (31)..(31): Xaa at this position is a single (one, 1) amino acid selected from the following options: Asp Gly
  MISC_FEATURE (32)..(32): Xaa at this position is a single (one, 1) amino acid selected from the following options: Asn Lys
  MISC_FEATURE (33)..(33): Xaa at this position is a single (one, 1) amino acid selected from the following options: Leu Gly
  MISC_FEATURE (34)..(34): Xaa at this position is a single (one, 1) amino acid selected from the following options: Gly Asp
  MISC_FEATURE (35)..(35): Xaa at this position is a single (one, 1) amino acid selected from the following options: Ser Gly
  MISC_FEATURE (36)..(36): Xaa at this position is a single (one, 1) amino acid selected from the following options: Ser Gly
  MISC_FEATURE (37)..(37): Xaa at this position is a single (one, 1) amino acid selected from the following options: Ala Gly
  MISC_FEATURE (38)..(38): Xaa at this position is a single (one, 1) amino acid selected from the following options: Gly Ala
  MISC_FEATURE (39)..(39): Xaa at this position is a single (one, 1) amino acid selected from the following options: Ser Ala
  MISC_FEATURE (40)..(40): Xaa at this position is a single (one, 1) amino acid selected from the following options: Ile Val
  MISC_FEATURE (41)..(41): Xaa at this position is a single (one, 1) amino acid selected from the following options: Arg Trp
  MISC_FEATURE (42)..(42): Xaa at this position is a single (one, 1) amino acid selected from the following options: Asp Glu
  MISC_FEATURE (50)..(50): Xaa at this position is a single (one, 1) amino acid selected from the following options: Lys Arg
  MISC_FEATURE (51)..(51): Xaa at this position is a single (one, 1) amino acid selected from the following options: Glu Gln
  MISC_FEATURE (52)..(52): Xaa at this position is a single (one, 1) amino acid selected from the following options: Gln Ala
  MISC_FEATURE (54)..(54): Xaa at this position is a single (one, 1) amino acid selected from the following options: Glu His
  MISC_FEATURE (59)..(59): Xaa at this position is a single (one, 1) amino acid selected from the following options: Phe Leu
  MISC_FEATURE (61)..(61): Xaa at this position is a single (one, 1) amino acid selected from the following options: Ala Glu
  MISC_FEATURE (62)..(62): Xaa at this position is a single (one, 1) amino acid selected from the following options: Arg Lys
  MISC_FEATURE (63)..(63): Xaa at this position is a single (one, 1) amino acid selected from the following options: Ala Glu
  MISC_FEATURE (64)..(64): Xaa at this position is a single (one, 1) amino acid selected from the following options: Lys Arg
  MISC_FEATURE (69)..(69): Xaa at this position is a single (one, 1) amino acid selected from the following options: Ala Ser
  MISC_FEATURE (71)..(71): Xaa at this position is a single (one, 1) amino acid selected from the following options: Lys Arg
  MISC_FEATURE (72)..(72): Xaa at this position is a single (one, 1) amino acid selected from the following options: Lys Glu
  MISC_FEATURE (76)..(76): Xaa at this position is a single (one, 1) amino acid selected from the following options: Glu Asn
  MISC_FEATURE (79)..(79): Xaa at this position is a single (one, 1) amino acid selected from the following options: Ser Asp
  MISC_FEATURE (82)..(82): Xaa at this position is a single (one, 1) amino acid selected from the following options: Lys Val
  MISC_FEATURE (86)..(86): Xaa at this position is a single (one, 1) amino acid selected from the following options: Glu Gln
  MISC_FEATURE (87)..(87): Xaa at this position is a single (one, 1) amino acid selected from the following options: His Arg
  MISC_FEATURE (93)..(93): Xaa at this position is a single (one, 1) amino acid selected from the following options: Glu Asp
  MISC_FEATURE (97)..(97): Xaa at this position is a single (one, 1) amino acid selected from the following options: Gln Asn
  MISC_FEATURE (98)..(98): Xaa at this position is a single (one, 1) amino acid selected from the following options: Ser Lys
  MISC_FEATURE (104)..(104): Xaa at this position is a single (one, 1) amino acid selected from the following options: His Gly
  MISC_FEATURE (108)..(108): Asp or is absent (no amino acid at this position and so this position is not present)
MAVTALAARTWLGVWGVRTMQARGFXXXXXXXXXXXXXXXXXAGGAFGKXXXAXEERYXRXXXXEQLAXLXXHHEXEIXHHXKEIXXLQKEIXRHKXXIKKLKXDDDX

SEQ ID NO: 20 - protein, 108 aa, Artificial Sequence
  Designed; as detailed elsewhere in present application
  MISC_FEATURE (26)..(26): Xaa at this position is a single (one, 1) amino acid selected from the following options: Gly Leu
  MISC_FEATURE (27)..(27): Xaa at this position is a single (one, 1) amino acid selected from the following options: Ser Gly
  MISC_FEATURE (28)..(28): Xaa at this position is a single (one, 1) amino acid selected from the following options: Glu Asp
  MISC_FEATURE (29)..(29): Xaa at this position is a single (one, 1) amino acid selected from the following options: Gly Ser
  MISC_FEATURE (30)..(30): Xaa at this position is a single (one, 1) amino acid selected from the following options: Ala Ser
  MISC_FEATURE (31)..(31): Xaa at this position is a single (one, 1) amino acid selected from the following options: Asp Gly
  MISC_FEATURE (32)..(32): Xaa at this position is a single (one, 1) amino acid selected from the following options: Asn Lys
  MISC_FEATURE (33)..(33): Xaa at this position is a single (one, 1) amino acid selected from the following options: Leu Gly
  MISC_FEATURE (34)..(34): Xaa at this position is a single (one, 1) amino acid selected from the following options: Gly Asp
  MISC_FEATURE (35)..(35): Xaa at this position is a single (one, 1) amino acid selected from the following options: Ser Gly
  MISC_FEATURE (36)..(36): Xaa at this position is a single (one, 1) amino acid selected from the following options: Ser Gly
  MISC_FEATURE (37)..(37): Xaa at this position is a single (one, 1) amino acid selected from the following options: Ala Gly
  MISC_FEATURE (38)..(38): Xaa at this position is a single (one, 1) amino acid selected from the following options: Gly Ala
  MISC_FEATURE (39)..(39): Xaa at this position is a single (one, 1) amino acid selected from the following options: Ser Ala
  MISC_FEATURE (40)..(40): Xaa at this position is a single (one, 1) amino acid selected from the following options: Ile Val
  MISC_FEATURE (41)..(41): Xaa at this position is a single (one, 1) amino acid selected from the following options: Arg Trp
  MISC_FEATURE (42)..(42): Xaa at this position is a single (one, 1) amino acid selected from the following options: Asp Glu
  MISC_FEATURE (50)..(50): Xaa at this position is a single (one, 1) amino acid selected from the following options: Lys Arg
  MISC_FEATURE (51)..(51): Xaa at this position is a single (one, 1) amino acid selected from the following options: Glu Gln
  MISC_FEATURE (52)..(52): Xaa at this position is a single (one, 1) amino acid selected from the following options: Gln Ala
  MISC_FEATURE (54)..(54): Xaa at this position is a single (one, 1) amino acid selected from the following options: Glu His
  MISC_FEATURE (59)..(59): Xaa at this position is a single (one, 1) amino acid selected from the following options: Phe Leu
  MISC_FEATURE (61)..(61): Xaa at this position is a single (one, 1) amino acid selected from the following options: Ala Glu
  MISC_FEATURE (62)..(62): Xaa at this position is a single (one, 1) amino acid selected from the following options: Arg Lys
  MISC_FEATURE (63)..(63): Xaa at this position is a single (one, 1) amino acid selected from the following options: Ala Glu
  MISC_FEATURE (64)..(64): Xaa at this position is a single (one, 1) amino acid selected from the following options: Lys Arg
  MISC_FEATURE (69)..(69): Xaa at this position is a single (one, 1) amino acid selected from the following options: Ala Ser
  MISC_FEATURE (71)..(71): Xaa at this position is a single (one, 1) amino acid selected from the following options: Lys Arg
  MISC_FEATURE (72)..(72): Xaa at this position is a single (one, 1) amino acid selected from the following options: Lys Glu
  MISC_FEATURE (76)..(76): Xaa at this position is a single (one, 1) amino acid selected from the following options: Glu Asn
  MISC_FEATURE (79)..(79): Xaa at this position is a single (one, 1) amino acid selected from the following options: Ser Asp
  MISC_FEATURE (82)..(82): Xaa at this position is a single (one, 1) amino acid selected from the following options: Lys Val
  MISC_FEATURE (86)..(86): Xaa at this position is a single (one, 1) amino acid selected from the following options: Glu Gln
  MISC_FEATURE (87)..(87): Xaa at this position is a single (one, 1) amino acid selected from the following options: His Arg
  MISC_FEATURE (93)..(93): Xaa at this position is a single (one, 1) amino acid selected from the following options: Glu Asp
  MISC_FEATURE (97)..(97): Xaa at this position is a single (one, 1) amino acid selected from the following options: Gln Asn
  MISC_FEATURE (98)..(98): Xaa at this position is a single (one, 1) amino acid selected from the following options: Ser Lys
  MISC_FEATURE (104)..(104): Xaa at this position is a single (one, 1) amino acid selected from the following options: His Gly
  MISC_FEATURE (108)..(108): Asp or is absent (no amino acid at this position and so this position is not present)
MAGSALAVRARFGVWGMKVLQTRGFXXXXXXXXXXXXXXXXXAGGAFGKXXXAXEERYXRXXXXEQLAXLXXHHEXEIXHHXKEIXXLQKEIXRHKXXIKKLKXDDDX

SEQ ID NO: 21 - protein, 115 aa, Artificial Sequence
  Designed; as detailed elsewhere in present application
  MISC_FEATURE (3)..(3): Xaa at this position is a single (one, 1) amino acid selected from the following options: Val Gly Ala Thr
  MISC_FEATURE (4)..(4): Xaa at this position is a single (one, 1) amino acid selected from the following options: Thr Ser Pro
  MISC_FEATURE (5)..(5): Xaa at this position is a single (one, 1) amino acid selected from the following options: Glu Ala Val
  MISC_FEATURE (6)..(6): Xaa at this position is a single (one, 1) amino acid selected from the following options: Leu Thr Gln
  MISC_FEATURE (7)..(7): Xaa at this position is a single (one, 1) amino acid selected from the following options: Ala Val
  MISC_FEATURE (8)..(8): Xaa at this position is a single (one, 1) amino acid selected from the following options: Ala Val Leu Ile Thr
  MISC_FEATURE (9)..(9): Xaa at this position is a single (one, 1) amino acid selected from the following options: Trp Arg Gln
  MISC_FEATURE (10)..(10): Xaa at this position is a single (one, 1) amino acid selected from the following options: Thr Val Met Ala Ser Leu
  MISC_FEATURE (11)..(11): Xaa at this position is a single (one, 1) amino acid selected from the following options: Gln Trp Arg
  MISC_FEATURE (12)..(12): Xaa at this position is a single (one, 1) amino acid selected from the following options: Leu Phe Gln
  MISC_FEATURE (13)..(13): Xaa at this position is a single (one, 1) amino acid selected from the following options: Arg Gly Tyr Cys Ala
  MISC_FEATURE (14)..(14): Xaa at this position is a single (one, 1) amino acid selected from the following options: Val Ser Ala Thr Met Arg
  MISC_FEATURE (15)..(15): Xaa at this position is a single (one, 1) amino acid selected from the following options: Trp Leu
  MISC_FEATURE (16)..(16): Xaa at this position is a single (one, 1) amino acid selected from the following options: Gly Ser
  MISC_FEATURE (17)..(17): Xaa at this position is a single (one, 1) amino acid selected from the following options: Val Ala Met
  MISC_FEATURE (18)..(18): Xaa at this position is a single (one, 1) amino acid selected from the following options: Arg Trp Lys Leu
  MISC_FEATURE (19)..(19): Xaa at this position is a single (one, 1) amino acid selected from the following options: Thr Ala Val Ser
  MISC_FEATURE (20)..(20): Xaa at this position is a single (one, 1) amino acid selected from the following options: Met Leu Ile Arg Val Ala Thr
  MISC_FEATURE (21)..(21): Xaa at this position is a single (one, 1) amino acid selected from the following options: Gln Arg
  MISC_FEATURE (22)..(22): Xaa at this position is a single (one, 1) amino acid selected from the following options: Ala Thr Gly Ser
  MISC_FEATURE (23)..(23): Xaa at this position is a single (one, 1) amino acid selected from the following options: Leu Arg Gln Gly
  MISC_FEATURE (24)..(24): Xaa at this position is a single (one, 1) amino acid selected from the following options: Gly Ser
  MISC_FEATURE (25)..(25): Xaa at this position is a single (one, 1) amino acid selected from the following options: Phe Tyr
  MISC_FEATURE (26)..(26): Xaa at this position is a single (one, 1) amino acid selected from the following options: Gly Ser Val Ala Thr Leu Arg Phe Ile Lys Met Gln Asn
  MISC_FEATURE (27)..(27): Xaa at this position is a single (one, 1) amino acid selected from the following options: Ser Cys Arg Gly Phe Thr Pro
  MISC_FEATURE (28)..(28): Xaa at this position is a single (one, 1) amino acid selected from the following options: Asp Glu Gly Ser Phe Lys Thr Leu Phe Pro
  MISC_FEATURE (29)..(29): Xaa at this position is a single (one, 1) amino acid selected from the following options: Pro Gln Arg Ser Thr Lys Gly Glu Ala Phe
  MISC_FEATURE (30)..(30): Xaa at this position is a single (one, 1) amino acid selected from the following options: Ser Pro Ala Gly Arg Glu Asp Val
  MISC_FEATURE (31)..(31): Xaa at this position is a single (one, 1) amino acid selected from the following options: Glu Asp Lys His Ala Gly Asn Ser Arg Gln Asp Thr Leu Val
  MISC_FEATURE (32)..(32): Xaa at this position is a single (one, 1) amino acid selected from the following options: Asn Asp Tyr Ser Gly Arg His Lys Glu Ala Leu
  MISC_FEATURE (33)..(33): Xaa at this position is a single (one, 1) amino acid selected from the following options: Val Leu Pro His Met Ile Phe Thr Gly Gly Ser Asp Glu Phe
  MISC_FEATURE (34)..(34): Xaa at this position is a single (one, 1) amino acid selected from the following options: Asp Gly His Arg Ser Glu Pro
  MISC_FEATURE (35)..(35): Xaa at this position is a single (one, 1) amino acid selected from the following options: Arg Ser Gly Thr Pro Ala Lys Glu
  MISC_FEATURE (36)..(36): Xaa at this position is a single (one, 1) amino acid selected from the following options: Arg Thr Gly Ser Arg Pro Lys Asp Ala
  MISC_FEATURE (37)..(37): Xaa at this position is a single (one, 1) amino acid selected from the following options: Ala Glu Ser Gly Arg
  MISC_FEATURE (38)..(38): Xaa at this position is a single (one, 1) amino acid selected from the following options: Ala Gly Gln Pro
  MISC_FEATURE (39)..(39): Xaa at this position is a single (one, 1) amino acid selected from the following options: Thr Ser Ala Arg
  MISC_FEATURE (40)..(40): Xaa at this position is a single (one, 1) amino acid selected from the following options: Ile Val Leu Glu Phe
  MISC_FEATURE (41)..(41): Xaa at this position is a single (one, 1) amino acid selected from the following options: Trp Arg Lys Glu Thr Tyr
  MISC_FEATURE (42)..(42): Xaa at this position is a single (one, 1) amino acid selected from the following options: Asn Glu Asp Ala Lys Ser
  MISC_FEATURE (43)..(43): Xaa at this position is a single (one, 1) amino acid selected from the following options: Ala Arg Lys Cys
  MISC_FEATURE (44)..(44): Xaa at this position is a single (one, 1) amino acid selected from the following options: Gly Tyr Glu Pro
  MISC_FEATURE (45)..(45): Xaa at this position is a single (one, 1) amino acid selected from the following options: Val Gly Phe Lys Arg
  MISC_FEATURE (46)..(46): Xaa at this position is a single (one, 1) amino acid selected from the following options: Asp Ala Ser Arg Leu
  MISC_FEATURE (47)..(47): Xaa at this position is a single (one, 1) amino acid selected from the following options: Phe Leu Ile Glu Ser
  MISC_FEATURE (48)..(48): Xaa at this position is a single (one, 1) amino acid selected from the following options: Arg Gly Ala Ile Glu Ser Pro
  MISC_FEATURE (49)..(49): Xaa at this position is a single (one, 1) amino acid selected from the following options: Lys Arg Thr Glu Gln
  MISC_FEATURE (50)..(50): Xaa at this position is a single (one, 1) amino acid selected from the following options: Arg Lys Met
  MISC_FEATURE (51)..(51): Xaa at this position is a single (one, 1) amino acid selected from the following options: Glu Ser Gln Ala Thr Tyr
  MISC_FEATURE (52)..(52): Xaa at this position is a single (one, 1) amino acid selected from the following options: Gln Ala Lys Arg Pro Phe Val
  MISC_FEATURE (53)..(53): Xaa at this position is a single (one, 1) amino acid selected from the following options: Ala Ser Arg
  MISC_FEATURE (54)..(54): Xaa at this position is a single (one, 1) amino acid selected from the following options: Lys Glu Asp His Ala Ile
  MISC_FEATURE (55)..(55): Xaa at this position is a single (one, 1) amino acid selected from the following options: Gly Glu Pro Arg
  MISC_FEATURE (56)..(56): Xaa at this position is a single (one, 1) amino acid selected from the following options: Glu Asp Tyr Thr Gln
  MISC_FEATURE (57)..(57): Xaa at this position is a single (one, 1) amino acid selected from the following options: Arg Met Lys
  MISC_FEATURE (58)..(58): Xaa at this position is a single (one, 1) amino acid selected from the following options: Tyr Phe Glu
  MISC_FEATURE (59)..(59): Xaa at this position is a single (one, 1) amino acid selected from the following options: Leu Phe Pro Gln
  MISC_FEATURE (60)..(60): Xaa at this position is a single (one, 1) amino acid selected from the following options: Arg Leu Lys
  MISC_FEATURE (61)..(61): Xaa at this position is a single (one, 1) amino acid selected from the following options: Ala Lys Glu Thr Asp Gln Arg
  MISC_FEATURE (62)..(62): Xaa at this position is a single (one, 1) amino acid selected from the following options: Gln Arg Lys Ala Cys
  MISC_FEATURE (63)..(63): Xaa at this position is a single (one, 1) amino acid selected from the following options: Ser Thr Ala Asn Glu Leu
  MISC_FEATURE (64)..(64): Xaa at this position is a single (one, 1) amino acid selected from the following options: Arg Lys Gln His Ala
  MISC_FEATURE (65)..(65): Xaa at this position is a single (one, 1) amino acid selected from the following options: Glu Gln Lys
  MISC_FEATURE (66)..(66): Xaa at this position is a single (one, 1) amino acid selected from the following options: Gln Lys
  MISC_FEATURE (67)..(67): Xaa at this position is a single (one, 1) amino acid selected from the following options: Leu His Met Glu
  MISC_FEATURE (68)..(68): Xaa at this position is a single (one, 1) amino acid selected from the following options: Ala Leu Glu Thr Asp Ser
  MISC_FEATURE (69)..(69): Xaa at this position is a single (one, 1) amino acid selected from the following options: Ala Thr Arg Ile Ser Asn Val Met Asp
  MISC_FEATURE (70)..(70): Xaa at this position is a single (one, 1) amino acid selected from the following options: Leu Glu
  MISC_FEATURE (71)..(71): Xaa at this position is a single (one, 1) amino acid selected from the following options: Lys Arg Ile
  MISC_FEATURE (72)..(72): Xaa at this position is a single (one, 1) amino acid selected from the following options: Lys Asn Arg Thr Glu
  MISC_FEATURE (73)..(73): Xaa at this position is a single (one, 1) amino acid selected from the following options: His Tyr
  MISC_FEATURE (75)..(75): Xaa at this position is a single (one, 1) amino acid selected from the following options: Glu Gln Lys Val
  MISC_FEATURE (76)..(76): Xaa at this position is a single (one, 1) amino acid selected from the following options: Glu Asp Asn Lys
  MISC_FEATURE (77)..(77): Xaa at this position is a single (one, 1) amino acid selected from the following options: Glu Val
  MISC_FEATURE (78)..(78): Xaa at this position is a single (one, 1) amino acid selected from the following options: Ile Val
  MISC_FEATURE (79)..(79): Xaa at this position is a single (one, 1) amino acid selected from the following options: Val Thr Ser Asp Asn Gly Ala Glu Gln Tyr Arg
  MISC_FEATURE (80)..(80): Xaa at this position is a single (one, 1) amino acid selected from the following options: His Val Tyr Ala
  MISC_FEATURE (81)..(81): Xaa at this position is a single (one, 1) amino acid selected from the following options: His Ser Thr Leu
  MISC_FEATURE (82)..(82): Xaa at this position is a single (one, 1) amino acid selected from the following options: Lys Ser Met Val His Ala Arg Gln Glu Ile Leu Val
  MISC_FEATURE (83)..(83): Xaa at this position is a single (one, 1) amino acid selected from the following options: Lys Glu Gln Arg Gly
  MISC_FEATURE (84)..(84): Xaa at this position is a single (one, 1) amino acid selected from the following options: Glu Ala Gln
  MISC_FEATURE (86)..(86): Xaa at this position is a single (one, 1) amino acid selected from the following options: Glu Lys Asp Gln
  MISC_FEATURE (87)..(87): Xaa at this position is a single (one, 1) amino acid selected from the following options: Arg His Leu Gln Cys Val Gln
  MISC_FEATURE (88)..(88): Xaa at this position is a single (one, 1) amino acid selected from the following options: Leu Met
  MISC_FEATURE (89)..(89): Xaa at this position is a single (one, 1) amino acid selected from the following options: Gln Glu Lys
  MISC_FEATURE (90)..(90): Xaa at this position is a single (one, 1) amino acid selected from the following options: Lys Asn Arg Gln
  MISC_FEATURE (91)..(91): Xaa at this position is a single (one, 1) amino acid selected from the following options: Glu Gln Asn
  MISC_FEATURE (92)..(92): Xaa at this position is a single (one, 1) amino acid selected from the following options: Ile Met
  MISC_FEATURE (93)..(93): Xaa at this position is a single (one, 1) amino acid selected from the following options: Glu Gln Asp Ile Lys
  MISC_FEATURE (94)..(94): Xaa at this position is a single (one, 1) amino acid selected from the following options: Arg Gln Lys Glu
  MISC_FEATURE (95)..(95): Xaa at this position is a single (one, 1) amino acid selected from the following options: His Leu Ile
  MISC_FEATURE (96)..(96): Xaa at this position is a single (one, 1) amino acid selected from the following options: Lys Gln Glu
  MISC_FEATURE (97)..(97): Xaa at this position is a single (one, 1) amino acid selected from the following options: Gln Lys Glu Tyr Gly Ser His Asp Asn
  MISC_FEATURE (98)..(98): Xaa at this position is a single (one, 1) amino acid selected from the following options: Lys Arg Ser Ala Asn Thr His Ser Leu
  MISC_FEATURE (99)..(99): Xaa at this position is a single (one, 1) amino acid selected from the following options: Ile Met Asp Val
  MISC_FEATURE (100)..(100): Xaa at this position is a single (one, 1) amino acid selected from the following options: Lys Gln Arg Asn
  MISC_FEATURE (101)..(101): Xaa at this position is a single (one, 1) amino acid selected from the following options: Met Thr Lys His Tyr Ser Gln Ile Val Asn Asp Arg
  MISC_FEATURE (103)..(103): Xaa at this position is a single (one, 1) amino acid selected from the following options: Lys Asn Ser His Arg Thr Gly
  MISC_FEATURE (104)..(104): Xaa at this position is a single (one, 1) amino acid selected from the following options: His Asp Asn Ser Arg Gln Glu Tyr Asn Leu Gln Gly
  MISC_FEATURE (105)..(105): Xaa at this position is a single (one, 1) amino acid selected from the following options: Asp His Ser Asn Ile or is absent (no amino acid at this position and so this position is not present)
  MISC_FEATURE (106)..(106): Xaa at this position is a single (one, 1) amino acid selected from the following options: Asp Glu His Gly Asn or is absent (no amino acid at this position and so this position is not present)
  MISC_FEATURE (107)..(107): Xaa at this position is a single (one, 1) amino acid selected from the following options: Asp His or is absent (no amino acid at this position and so this position is not present)
  MISC_FEATURE (108)..(108): Xaa at this position is a single (one, 1) amino acid selected from the following options: Asp Glu or is absent (no amino acid at this position and so this position is not present)
  MISC_FEATURE (109)..(109): Asp or is absent (no amino acid at this position and so this position is not present)
  MISC_FEATURE (110)..(110): Asp or is absent (no amino acid at this position and so this position is not present)
  MISC_FEATURE (111)..(111): Asp or is absent (no amino acid at this position and so this position is not present)
  MISC_FEATURE (112)..(112): Asp or is absent (no amino acid at this position and so this position is not present)
  MISC_FEATURE (113)..(113): Asp or is absent (no amino acid at this position and so this position is not present)
  MISC_FEATURE (114)..(114): Asp or is absent (no amino acid at this position and so this position is not present)
  MISC_FEATURE (115)..(115): Asp or is absent (no amino acid at this position and so this position is not present)
MAXXXXXXXXXXXXXXXXXXXXXXXXXXXXXXXXXXXXXXXXXXXXXXXXXXXXXXXXXXXXXXXXXXXXXXXHXXXXXXXXXXIXXXXXXXXXXXXXXXXLXXXXXXXXXXXXX

SEQ ID NO: 22 - protein, 109 aa, Artificial Sequence
  Designed; as detailed elsewhere in present application
  MISC_FEATURE (3)..(3): Xaa at this position is a single (one, 1) amino acid selected from the following options: Val Gly Ala Thr
  MISC_FEATURE (4)..(4): Xaa at this position is a single (one, 1) amino acid selected from the following options: Thr Ser Pro
  MISC_FEATURE (5)..(5): Xaa at this position is a single (one, 1) amino acid selected from the following options: Ala Val Glu
  MISC_FEATURE (6)..(6): Xaa at this position is a single (one, 1) amino acid selected from the following options: Leu Thr Gln
  MISC_FEATURE (7)..(7): Xaa at this position is a single (one, 1) amino acid selected from the following options: Ala Val
  MISC_FEATURE (8)..(8): Xaa at this position is a single (one, 1) amino acid selected from the following options: Ala Val Leu Ile Thr
  MISC_FEATURE (9)..(9): Xaa at this position is a single (one, 1) amino acid selected from the following options: Arg Gln Trp
  MISC_FEATURE (10)..(10): Xaa at this position is a single (one, 1) amino acid selected from the following options: Thr Val Met Ala Ser Leu
  MISC_FEATURE (11)..(11): Xaa at this position is a single (one, 1) amino acid selected from the following options: Trp Arg Gln
  MISC_FEATURE (12)..(12): Xaa at this position is a single (one, 1) amino acid selected from the following options: Leu Phe Gln
  MISC_FEATURE (13)..(13): Xaa at this position is a single (one, 1) amino acid selected from the following options: Gly Tyr Cys Ala Arg
  MISC_FEATURE (14)..(14): Xaa at this position is a single (one, 1) amino acid selected from the following options: Val Ser Ala Thr Met Arg
  MISC_FEATURE (15)..(15): Xaa at this position is a single (one, 1) amino acid selected from the following options: Trp Leu
  MISC_FEATURE (16)..(16): Xaa at this position is a single (one, 1) amino acid selected from the following options: Gly Ser
  MISC_FEATURE (17)..(17): Xaa at this position is a single (one, 1) amino acid selected from the following options: Val Ala Met
  MISC_FEATURE (18)..(18): Xaa at this position is a single (one, 1) amino acid selected from the following options: Arg Trp Lys Leu
  MISC_FEATURE (19)..(19): Xaa at this position is a single (one, 1) amino acid selected from the following options: Thr Ala Val Ser
  MISC_FEATURE (20)..(20): Xaa at this position is a single (one, 1) amino acid selected from the following options: Met Leu Ile Arg Val Ala Thr
  MISC_FEATURE (21)..(21): Xaa at this position is a single (one, 1) amino acid selected from the following options: Gln Arg
  MISC_FEATURE (22)..(22): Xaa at this position is a single (one, 1) amino acid selected from the following options: Ala Thr Gly Ser
  MISC_FEATURE (23)..(23): Xaa at this position is a single (one, 1) amino acid selected from the following options: Arg Gln Gly Leu
  MISC_FEATURE (24)..(24): Xaa at this position is a single (one, 1) amino acid selected from the following options: Gly Ser
  MISC_FEATURE (25)..(25): Xaa at this position is a single (one, 1) amino acid selected from the following options: Phe Tyr
  MISC_FEATURE (26)..(26): Xaa at this position is a single (one, 1) amino acid selected from the following options: Gly Ser Val Ala Thr
  MISC_FEATURE (27)..(27): Xaa at this position is a single (one, 1) amino acid selected from the following options: Ser Cys Arg
  MISC_FEATURE (28)..(28): Xaa at this position is a single (one, 1) amino acid selected from the following options: Asp Glu Gly Ser
  MISC_FEATURE (29)..(29): Xaa at this position is a single (one, 1) amino acid selected from the following options: Gln Arg Ser Thr Lys Pro
  MISC_FEATURE (30)..(30): Xaa at this position is a single (one, 1) amino acid selected from the following options: Ser Pro Ala Gly
  MISC_FEATURE (31)..(31): Xaa at this position is a single (one, 1) amino acid selected from the following options: Glu Asp Lys His Ala Gly Asn
  MISC_FEATURE (32)..(32): Xaa at this position is a single (one, 1) amino acid selected from the following options: Asn Asp Tyr Ser Gly Arg His
  MISC_FEATURE (33)..(33): Xaa at this position is a single (one, 1) amino acid selected from the following options: Val Leu Pro His Met Ile Phe Thr Gly
  MISC_FEATURE (34)..(34): Xaa at this position is a single (one, 1) amino acid selected from the following options: Asp Gly His Arg Ser Glu
  MISC_FEATURE (35)..(35): Xaa at this position is a single (one, 1) amino acid selected from the following options: Arg Ser Gly Thr Pro Ala
  MISC_FEATURE (36)..(36): Xaa at this position is a single (one, 1) amino acid selected from the following options: Gly Ser Arg Pro Lys Asp Arg Thr
  MISC_FEATURE (37)..(37): Xaa at this position is a single (one, 1) amino acid selected from the following options: Ala Glu Ser Glu
  MISC_FEATURE (38)..(38): Xaa at this position is a single (one, 1) amino acid selected from the following options: Gly Ala
  MISC_FEATURE (39)..(39): Xaa at this position is a single (one, 1) amino acid selected from the following options: Gly Pro Ala Val Leu Ile Met Cys Phe Tyr Trp His Lys Arg Gln Asn Glu Asp Ser Thr
  MISC_FEATURE (40)..(40): Xaa at this position is a single (one, 1) amino acid selected from the following options: Ile Val
  MISC_FEATURE (41)..(41): Xaa at this position is a single (one, 1) amino acid selected from the following options: Arg Lys Trp
  MISC_FEATURE (42)..(42): Xaa at this position is a single (one, 1) amino acid selected from the following options: Glu Asp Asn
  MISC_FEATURE (45)..(45): Xaa at this position is a single (one, 1) amino acid selected from the following options: Gly Val
  MISC_FEATURE (46)..(46): Xaa at this position is a single (one, 1) amino acid selected from the following options: Ala Ser Asp
  MISC_FEATURE (48)..(48): Xaa at this position is a single (one, 1) amino acid selected from the following options: Gly Ala Arg
  MISC_FEATURE (49)..(49): Xaa at this position is a single (one, 1) amino acid selected from the following options: Lys Arg
  MISC_FEATURE (50)..(50): Xaa at this position is a single (one, 1) amino acid selected from the following options: Arg Lys
  MISC_FEATURE (51)..(51): Xaa at this position is a single (one, 1) amino acid selected from the following options: Gly Pro Ala Val Leu Ile Met Cys Phe Tyr Trp His Lys Arg Gln Asn Glu Asp Ser Thr
  MISC_FEATURE (52)..(52): Xaa at this position is a single (one, 1) amino acid selected from the following options: Gln Ala Lys Arg
  MISC_FEATURE (53)..(53): Xaa at this position is a single (one, 1) amino acid selected from the following options: Ala Ser
  MISC_FEATURE (54)..(54): Xaa at this position is a single (one, 1) amino acid selected from the following options: Glu Asp Lys
  MISC_FEATURE (55)..(55): Xaa at this position is a single (one, 1) amino acid selected from the following options: Glu Gly
  MISC_FEATURE (56)..(56): Xaa at this position is a single (one, 1) amino acid selected from the following options: Glu Asp
  MISC_FEATURE (59)..(59): Xaa at this position is a single (one, 1) amino acid selected from the following options: Phe Leu
  MISC_FEATURE (60)..(60): Xaa at this position is a single (one, 1) amino acid selected from the following options: Arg Leu
  MISC_FEATURE (61)..(61): Xaa at this position is a single (one, 1) amino acid selected from the following options: Ala Lys Glu Thr
  MISC_FEATURE (62)..(62): Xaa at this position is a single (one, 1) amino acid selected from the following options: Gln Arg Lys
  MISC_FEATURE (63)..(63): Xaa at this position is a single (one, 1) amino acid selected from the following options: Ser Thr Ala Asn
  MISC_FEATURE (64)..(64): Xaa at this position is a single (one, 1) amino acid selected from the following options: Arg Lys
  MISC_FEATURE (65)..(65): Xaa at this position is a single (one, 1) amino acid selected from the following options: Glu Gln
  MISC_FEATURE (68)..(68): Xaa at this position is a single (one, 1) amino acid selected from the following options: Ala Leu Glu Thr
  MISC_FEATURE (69)..(69): Xaa at this position is a single (one, 1) amino acid selected from the following options: Ala Thr Arg Ile
  MISC_FEATURE (71)..(71): Xaa at this position is a single (one, 1) amino acid selected from the following options: Lys Arg
  MISC_FEATURE (73)..(73): Xaa at this position is a single (one, 1) amino acid selected from the following options: Gly Pro Ala Val Leu Ile Met Cys Phe Tyr Trp His Lys Arg Gln Asn Glu Asp Ser Thr
  MISC_FEATURE (74)..(74): Xaa at this position is a single (one, 1) amino acid selected from the following options: Gly Pro Ala Val Leu Ile Met Cys Phe Tyr Trp His Lys Arg Gln Asn Glu Asp Ser Thr
  MISC_FEATURE (76)..(76): Xaa at this position is a single (one, 1) amino acid selected from the following options: Glu Asp Asn
  MISC_FEATURE (78)..(78): Xaa at this position is a single (one, 1) amino acid selected from the following options: Ile Val
  MISC_FEATURE (79)..(79): Xaa at this position is a single (one, 1) amino acid selected from the following options: Val Thr Ser Asp Asn Gly Ala Glu Gln
  MISC_FEATURE (80)..(80): Xaa at this position is a single (one, 1) amino acid selected from the following options: Gly Pro Ala Val Leu Ile Met Cys Phe Tyr Trp His Lys Arg Gln Asn Glu Asp Ser Thr
  MISC_FEATURE (81)..(81): Xaa at this position is a single (one, 1) amino acid selected from the following options: Gly Pro Ala Val Leu Ile Met Cys Phe Tyr Trp His Lys Arg Gln Asn Glu Asp Ser Thr
  MISC_FEATURE (82)..(82): Xaa at this position is a single (one, 1) amino acid selected from the following options: Lys Ser Met Val His Ala Arg Gln Glu
  MISC_FEATURE (83)..(83): Xaa at this position is a single (one, 1) amino acid selected from the following options: Lys Glu Gln Arg
  MISC_FEATURE (86)..(86): Xaa at this position is a single (one, 1) amino acid selected from the following options: Glu Lys
  MISC_FEATURE (87)..(87): Xaa at this position is a single (one, 1) amino acid selected from the following options: Arg His
  MISC_FEATURE (90)..(90): Xaa at this position is a single (one, 1) amino acid selected from the following options: Lys Asn
  MISC_FEATURE (91)..(91): Xaa at this position is a single (one, 1) amino acid selected from the following options: Glu Gln
  MISC_FEATURE (93)..(93): Xaa at this position is a single (one, 1) amino acid selected from the following options: Glu Gln
  MISC_FEATURE (94)..(94): Xaa at this position is a single (one, 1) amino acid selected from the following options: Arg Gln
  MISC_FEATURE (96)..(96): Xaa at this position is a single (one, 1) amino acid selected from the following options: Lys Gln
  MISC_FEATURE (97)..(97): Xaa at this position is a single (one, 1) amino acid selected from the following options: Gln Lys Glu
  MISC_FEATURE (98)..(98): Xaa at this position is a single (one, 1) amino acid selected from the following options: Lys Arg Ser Ala Asn Thr
  MISC_FEATURE (99)..(99): Xaa at this position is a single (one, 1) amino acid selected from the following options: Ile Met
  MISC_FEATURE (100)..(100): Xaa at this position is a single (one, 1) amino acid selected from the following options: Lys Gln
  MISC_FEATURE (101)..(101): Xaa at this position is a single (one, 1) amino acid selected from the following options: Met Thr Lys His Tyr Ser Gln Ile Val Asn
  MISC_FEATURE (103)..(103): Xaa at this position is a single (one, 1) amino acid selected from the following options: Lys Asn Ser His
  MISC_FEATURE (104)..(104): Xaa at this position is a single (one, 1) amino acid selected from the following options: His Asp Asn Ser Arg Gln Glu Tyr
  MISC_FEATURE (105)..(105): Xaa at this position is a single (one, 1) amino acid selected from the following options: Asp His Ser Asn Ile
  MISC_FEATURE (106)..(106): Xaa at this position is a single (one, 1) amino acid selected from the following options: Asp Glu His Gly or is absent (no amino acid at this position and so this position is not present)
  MISC_FEATURE (107)..(107): Xaa at this position is a single (one, 1) amino acid selected from the following options: Asp His or is absent (no amino acid at this position and so this position is not present)
  MISC_FEATURE (108)..(108): Xaa at this position is a single (one, 1) amino acid selected from the following options: Asp or is absent (no amino acid at this position and so this position is not present)
  MISC_FEATURE (109)..(109): Xaa at this position is a single (one, 1) amino acid selected from the following options: Asp or is absent (no amino acid at this position and so this position is not present)
MAXXXXXXXXXXXXXXXXXXXXXXXXXXXXXXXXXXXXXXXXAGXXFXXXXXXXXXRYXXXXXXXQLXXLXKXXEXEXXXXXXEIXXLQXXIXXHXXXXXXLXXXXXXX

SEQ ID NO: 23 - protein, 109 aa, Artificial Sequence
  Designed; as detailed elsewhere in present application
  MISC_FEATURE (3)..(3): Xaa at this position is a single (one, 1) amino acid selected from the following options: Val Ala
  MISC_FEATURE (7)..(7): Xaa at this position is a single (one, 1) amino acid selected from the following options: Ala Val
  MISC_FEATURE (11)..(11): Xaa at this position is a single (one, 1) amino acid selected from the following options: Trp Arg
  MISC_FEATURE (12)..(12): Xaa at this position is a single (one, 1) amino acid selected from the following options: Leu Phe
  MISC_FEATURE (16)..(16): Xaa at this position is a single (one, 1) amino acid selected from the following options: Gly Ser
  MISC_FEATURE (18)..(18): Xaa at this position is a single (one, 1) amino acid selected from the following options: Arg Trp
  MISC_FEATURE (19)..(19): Xaa at this position is a single (one, 1) amino acid selected from the following options: Thr Ala
  MISC_FEATURE (22)..(22): Xaa at this position is a single (one, 1) amino acid selected from the following options: Ala Gly
  MISC_FEATURE (28)..(28): Xaa at this position is a single (one, 1) amino acid selected from the following options: Asp Glu
  MISC_FEATURE (29)..(29): Xaa at this position is a single (one, 1) amino acid selected from the following options: Gln Ser
  MISC_FEATURE (30)..(30): Xaa at this position is a single (one, 1) amino acid selected from the following options: Ser Ala
  MISC_FEATURE (31)..(31): Xaa at this position is a single (one, 1) amino acid selected from the following options: Glu Asp
  MISC_FEATURE (33)..(33): Xaa at this position is a single (one, 1) amino acid selected from the following options: Val Leu
  MISC_FEATURE (34)..(34): Xaa at this position is a single (one, 1) amino acid selected from the following options: Asp Gly
  MISC_FEATURE (35)..(35): Xaa at this position is a single (one, 1) amino acid selected from the following options: Arg Ser
  MISC_FEATURE (36)..(36): Xaa at this position is a single (one, 1) amino acid selected from the following options: Gly Ser
  MISC_FEATURE (39)..(39): Xaa at this position is a single (one, 1) amino acid selected from the following options: Gly Pro Ala Val Leu Ile Met Cys Phe Tyr Trp His Lys Arg Gln Asn Glu Asp Ser Thr
  MISC_FEATURE (40)..(40): Xaa at this position is a single (one, 1) amino acid selected from the following options: Ile Val
  MISC_FEATURE (42)..(42): Xaa at this position is a single (one, 1) amino acid selected from the following options: Glu Asp
  MISC_FEATURE (50)..(50): Xaa at this position is a single (one, 1) amino acid selected from the following options: Arg Lys
  MISC_FEATURE (51)..(51): Xaa at this position is a single (one, 1) amino acid selected from the following options: Gly Pro Ala Val Leu Ile Met Cys Phe Tyr Trp His Lys Arg Gln Asn Glu Asp Ser Thr
  MISC_FEATURE (54)..(54): Xaa at this position is a single (one, 1) amino acid selected from the following options: Glu Asp
  MISC_FEATURE (56)..(56): Xaa at this position is a single (one, 1) amino acid selected from the following options: Glu Asp
  MISC_FEATURE (62)..(62): Xaa at this position is a single (one, 1) amino acid selected from the following options: Gln Arg
  MISC_FEATURE (63)..(63): Xaa at this position is a single (one, 1) amino acid selected from the following options: Ser Thr Ala
  MISC_FEATURE (64)..(64): Xaa at this position is a single (one, 1) amino acid selected from the following options: Arg Lys
  MISC_FEATURE (71)..(71): Xaa at this position is a single (one, 1) amino acid selected from the following options: Lys Arg
  MISC_FEATURE (73)..(73): Xaa at this position is a single (one, 1) amino acid selected from the following options: Gly Pro Ala Val Leu Ile Met Cys Phe Tyr Trp His Lys Arg Gln Asn Glu Asp Ser Thr
  MISC_FEATURE (74)..(74): Xaa at this position is a single (one, 1) amino acid selected from the following options: Gly Pro Ala Val Leu Ile Met Cys Phe Tyr Trp His Lys Arg Gln Asn Glu Asp Ser Thr
  MISC_FEATURE (76)..(76): Xaa at this position is a single (one, 1) amino acid selected from the following options: Glu Asp Asn
  MISC_FEATURE (79)..(79): Xaa at this position is a single (one, 1) amino acid selected from the following options: Val Ser
  MISC_FEATURE (80)..(80): Xaa at this position is a single (one, 1) amino acid selected from the following options: Gly Pro Ala Val Leu Ile Met Cys Phe Tyr Trp His Lys Arg Gln Asn Glu Asp Ser Thr
  MISC_FEATURE (81)..(81): Xaa at this position is a single (one, 1) amino acid selected from the following options: Gly Pro Ala Val Leu Ile Met Cys Phe Tyr Trp His Lys Arg Gln Asn Glu Asp Ser Thr
  MISC_FEATURE (82)..(82): Xaa at this position is a single (one, 1) amino acid selected from the following options: Lys Val Met
  MISC_FEATURE (87)..(87): Xaa at this position is a single (one, 1) amino acid selected from the following options: Arg His
  MISC_FEATURE (91)..(91): Xaa at this position is a single (one, 1) amino acid selected from the following options: Glu Gln
  MISC_FEATURE (98)..(98): Xaa at this position is a single (one, 1) amino acid selected from the following options: Lys Ser
  MISC_FEATURE (101)..(101): Xaa at this position is a single (one, 1) amino acid selected from the following options: Met Thr Lys
  MISC_FEATURE (106)..(106): Asp or is absent (no amino acid at this position and so this position is not present)
  MISC_FEATURE (107)..(107): Asp or is absent (no amino acid at this position and so this position is not present)
  MISC_FEATURE (108)..(108): Asp or is absent (no amino acid at this position and so this position is not present)
  MISC_FEATURE (109)..(109): Asp or is absent (no amino acid at this position and so this position is not present)
MAXTALXARTXXGVWXVXXMQXRGFGSXXXXNXXXXAGXXRXAGGAFGKXXQAXEXRYFRAXXXEQLAALXKXXEXEIXXXXKEIEXLQKXIERHKQXIKXLKHDXXXX

SEQ ID NO: 24 - protein, 107 aa, Artificial Sequence
  Designed; as detailed elsewhere in present application
  misc_feature (3)..(3): Xaa at this position is a single (one, 1) amino acid selected from the following options: Ala Thr Val
  misc_feature (4)..(4): Xaa at this position is a single (one, 1) amino acid selected from the following options: Thr Ser
  misc_feature (5)..(5): Xaa at this position is a single (one, 1) amino acid selected from the following options: Ala Glu
  misc_feature (7)..(7): Xaa at this position is a single (one, 1) amino acid selected from the following options: Ala Val
  misc_feature (9)..(9): Xaa at this position is a single (one, 1) amino acid selected from the following options: Arg Trp
  misc_feature (10)..(10): Xaa at this position is a single (one, 1) amino acid selected from the following options: Thr Met
  misc_feature (11)..(11): Xaa at this position is a single (one, 1) amino acid selected from the following options: Arg Gln Trp
  misc_feature (12)..(12): Xaa at this position is a single (one, 1) amino acid selected from the following options: Phe Leu
  misc_feature (13)..(13): Xaa at this position is a single (one, 1) amino acid selected from the following options: Gly Arg Tyr Cys
  misc_feature (14)..(14): Xaa at this position is a single (one, 1) amino acid selected from the following options: Val Ser Ala Met
  misc_feature (15)..(15): Xaa at this position is a single (one, 1) amino acid selected from the following options: Trp Leu
  misc_feature (16)..(16): Xaa at this position is a single (one, 1) amino acid selected from the following options: Ser Gly
  misc_feature (17)..(17): Xaa at this position is a single (one, 1) amino acid selected from the following options: Val Ala
  misc_feature (18)..(18): Xaa at this position is a single (one, 1) amino acid selected from the following options: Trp Arg
  misc_feature (19)..(19): Xaa at this position is a single (one, 1) amino acid selected from the following options: Ala Thr Val
  misc_feature (20)..(20): Xaa at this position is a single (one, 1) amino acid selected from the following options: Met Val Arg
  misc_feature (22)..(22): Xaa at this position is a single (one, 1) amino acid selected from the following options: Gly Ala Thr
  misc_feature (23)..(23): Xaa at this position is a single (one, 1) amino acid selected from the following options: Arg Leu Gln
  misc_feature (24)..(24): Xaa at this position is a single (one, 1) amino acid selected from the following options: Gly Ser
  misc_feature (26)..(26): Xaa at this position is a single (one, 1) amino acid selected from the following options: Gly Ser
  misc_feature (28)..(28): Xaa at this position is a single (one, 1) amino acid selected from the following options: Glu Asp
  misc_feature (29)..(29): Xaa at this position is a single (one, 1) amino acid selected from the following options: Ser Gln Pro
  misc_feature (30)..(30): Xaa at this position is a single (one, 1) amino acid selected from the following options: Ala Ser Pro
  misc_feature (31)..(31): Xaa at this position is a single (one, 1) amino acid selected from the following options: Asp Glu His
  misc_feature (32)..(32): Xaa at this position is a single (one, 1) amino acid selected from the following options: Asn Asp
  misc_feature (33)..(33): Xaa at this position is a single (one, 1) amino acid selected from the following options: Leu Val
  misc_feature (34)..(34): Xaa at this position is a single (one, 1) amino acid selected from the following options: Gly Asp Arg
  misc_feature (35)..(35): Xaa at this position is a single (one, 1) amino acid selected from the following options: Ser Arg
  misc_feature (36)..(36): Xaa at this position is a single (one, 1) amino acid selected from the following options: Ser Gly Thr Arg
  misc_feature (37)..(37): Xaa at this position is a single (one, 1) amino acid selected from the following options: Ala Glu Ser
  misc_feature (38)..(38): Xaa at this position is a single (one, 1) amino acid selected from the following options: Gly Ala
  misc_feature (39)..(39): Xaa at this position is a single (one, 1) amino acid selected from the following options: Gly Pro Ala Val Leu Ile Met Cys Phe Tyr Trp His Lys Arg Gln Asn Glu Asp Ser Thr
  misc_feature (40)..(40): Xaa at this position is a single (one, 1) amino acid selected from the following options: Ile Val
  misc_feature (41)..(41): Xaa at this position is a single (one, 1) amino acid selected from the following options: Arg Trp
  misc_feature (42)..(42): Xaa at this position is a single (one, 1) amino acid selected from the following options: Asp Asn Glu
  misc_feature (45)..(45): Xaa at this position is a single (one, 1) amino acid selected from the following options: Gly Val
  misc_feature (46)..(46): Xaa at this position is a single (one, 1) amino acid selected from the following options: Ala Asp
  misc_feature (48)..(48): Xaa at this position is a single (one, 1) amino acid selected from the following options: Gly Arg Ala
  misc_feature (50)..(50): Xaa at this position is a single (one, 1) amino acid selected from the following options: Lys Arg
  misc_feature (51)..(51): Xaa at this position is a single (one, 1) amino acid selected from the following options: Gly Pro Ala Val Leu Ile Met Cys Phe Tyr Trp His Lys Arg Gln Asn Glu Asp Ser Thr
  misc_feature (52)..(52): Xaa at this position is a single (one, 1) amino acid selected from the following options: Gln Ala
  misc_feature (54)..(54): Xaa at this position is a single (one, 1) amino acid selected from the following options: Glu Lys
  misc_feature (55)..(55): Xaa at this position is a single (one, 1) amino acid selected from the following options: Glu Gly
  misc_feature (59)..(59): Xaa at this position is a single (one, 1) amino acid selected from the following options: Phe Leu
  misc_feature (62)..(62): Xaa at this position is a single (one, 1) amino acid selected from the following options: Arg Gln
  misc_feature (63)..(63): Xaa at this position is a single (one, 1) amino acid selected from the following options: Ala Ser Thr
  misc_feature (64)..(64): Xaa at this position is a single (one, 1) amino acid selected from the following options: Lys Arg
  misc_feature (68)..(68): Xaa at this position is a single (one, 1) amino acid selected from the following options: Ala Thr
  misc_feature (69)..(69): Xaa at this position is a single (one, 1) amino acid selected from the following options: Ala Thr
  misc_feature (73)..(73): Xaa at this position is a single (one, 1) amino acid selected from the following options: Gly Pro Ala Val Leu Ile Met Cys Phe Tyr Trp His Lys Arg Gln Asn Glu Asp Ser Thr
  misc_feature (74)..(74): Xaa at this position is a single (one, 1) amino acid selected from the following options: Gly Pro Ala Val Leu Ile Met Cys Phe Tyr Trp His Lys Arg Gln Asn Glu Asp Ser Thr
  misc_feature (76)..(76): Xaa at this position is a single (one, 1) amino acid selected from the following options: Asn Glu Asp
  misc_feature (79)..(79): Xaa at this position is a single (one, 1) amino acid selected from the following options: Ser Thr Gly Val
  misc_feature (80)..(80): Xaa at this position is a single (one, 1) amino acid selected from the following options: Gly Pro Ala Val Leu Ile Met Cys Phe Tyr Trp His Lys Arg Gln Asn Glu Asp Ser Thr
  misc_feature (81)..(81): Xaa at this position is a single (one, 1) amino acid selected from the following options: Gly Pro Ala Val Leu Ile Met Cys Phe Tyr Trp His Lys Arg Gln Asn Glu Asp Ser Thr
  misc_feature (82)..(82): Xaa at this position is a single (one, 1) amino acid selected from the following options: Val Met Lys Glu
  misc_feature (87)..(87): Xaa at this position is a single (one, 1) amino acid selected from the following options: His Arg
  misc_feature (90)..(90): Xaa at this position is a single (one, 1) amino acid selected from the following options: Lys Asn
  misc_feature (98)..(98): Xaa at this position is a single (one, 1) amino acid selected from the following options: Ser Lys
  misc_feature (101)..(101): Xaa at this position is a single (one, 1) amino acid selected from the following options: Lys Met Ile Thr
  misc_feature (104)..(104): Xaa at this position is a single (one, 1) amino acid selected from the following options: His Gln Arg Asp
  misc_feature (105)..(105): Xaa at this position is a single (one, 1) amino acid selected from the following options: Asp Asn
  misc_feature (107)..(107): Asp or is absent (no amino acid at this position and so this position is not present)
MAXXXLXAXXXXXXXXXXXXQXXXFXSXXXXXXXXXXXXXXXAGXXFXKXXXAXXERYXRAXXXEQLXXLKKXXEXEIXXXXKEIEXLQXEIERHKQXIKXLKXXDX

SEQ ID NO: 25 - protein, 107 aa, Artificial Sequence
  Designed; as detailed elsewhere in present application
  MISC_FEATURE (11)..(11): Xaa at this position is a single (one, 1) amino acid selected from the following options: Arg Trp
  MISC_FEATURE (12)..(12): Xaa at this position is a single (one, 1) amino acid selected from the following options: Phe Leu
  MISC_FEATURE (16)..(16): Xaa at this position is a single (one, 1) amino acid selected from the following options: Ser Gly
  MISC_FEATURE (18)..(18): Xaa at this position is a single (one, 1) amino acid selected from the following options: Trp Arg
  MISC_FEATURE (19)..(19): Xaa at this position is a single (one, 1) amino acid selected from the following options: Ala Thr
  MISC_FEATURE (22)..(22): Xaa at this position is a single (one, 1) amino acid selected from the following options: Gly Ala
  MISC_FEATURE (28)..(28): Xaa at this position is a single (one, 1) amino acid selected from the following options: Glu Asp
  MISC_FEATURE (29)..(29): Xaa at this position is a single (one, 1) amino acid selected from the following options: Ser Gln
  MISC_FEATURE (30)..(30): Xaa at this position is a single (one, 1) amino acid selected from the following options: Ala Ser
  MISC_FEATURE (31)..(31): Xaa at this position is a single (one, 1) amino acid selected from the following options: Asp Glu
  MISC_FEATURE (34)..(34): Xaa at this position is a single (one, 1) amino acid selected from the following options: Gly Asp
  MISC_FEATURE (35)..(35): Xaa at this position is a single (one, 1) amino acid selected from the following options: Ser Arg
  MISC_FEATURE (36)..(36): Xaa at this position is a single (one, 1) amino acid selected from the following options: Ser Gly
  MISC_FEATURE (39)..(39): Xaa at this position is a single (one, 1) amino acid selected from the following options: Gly Pro Ala Val Leu Ile Met Cys Phe Tyr Trp His Lys Arg Gln Asn Glu Asp Ser Thr
  MISC_FEATURE (40)..(40): Xaa at this position is a single (one, 1) amino acid selected from the following options: Ile Val
  MISC_FEATURE (42)..(42): Xaa at this position is a single (one, 1) amino acid selected from the following options: Asp Glu
  MISC_FEATURE (50)..(50): Xaa at this position is a single (one, 1) amino acid selected from the following options: Lys Arg
  MISC_FEATURE (51)..(51): Xaa at this position is a single (one, 1) amino acid selected from the following options: Gly Pro Ala Val Leu Ile Met Cys Phe Tyr Trp His Lys Arg Gln Asn Glu Asp Ser Thr
  MISC_FEATURE (62)..(62): Xaa at this position is a single (one, 1) amino acid selected from the following options: Arg Gln
  MISC_FEATURE (64)..(64): Xaa at this position is a single (one, 1) amino acid selected from the following options: Lys Arg
  MISC_FEATURE (73)..(73): Xaa at this position is a single (one, 1) amino acid selected from the following options: Gly Pro Ala Val Leu Ile Met Cys Phe Tyr Trp His Lys Arg Gln Asn Glu Asp Ser Thr
  MISC_FEATURE (74)..(74): Xaa at this position is a single (one, 1) amino acid selected from the following options: Gly Pro Ala Val Leu Ile Met Cys Phe Tyr Trp His Lys Arg Gln Asn Glu Asp Ser Thr
  MISC_FEATURE (76)..(76): Xaa at this position is a single (one, 1) amino acid selected from the following options: Asn Glu Asp
  MISC_FEATURE (79)..(79): Xaa at this position is a single (one, 1) amino acid selected from the following options: Ser Val
  MISC_FEATURE (80)..(80): Xaa at this position is a single (one, 1) amino acid selected from the following options: Gly Pro Ala Val Leu Ile Met Cys Phe Tyr Trp His Lys Arg Gln Asn Glu Asp Ser Thr
  MISC_FEATURE (81)..(81): Xaa at this position is a single (one, 1) amino acid selected from the following options: Gly Pro Ala Val Leu Ile Met Cys Phe Tyr Trp His Lys Arg Gln Asn Glu Asp Ser Thr
  MISC_FEATURE (82)..(82): Xaa at this position is a single (one, 1) amino acid selected from the following options: Val Met Lys
  MISC_FEATURE (87)..(87): Xaa at this position is a single (one, 1) amino acid selected from the following options: His Arg
  MISC_FEATURE (98)..(98): Xaa at this position is a single (one, 1) amino acid selected from the following options: Ser Lys
MAATALAARTXXGVWXVXXMQXRGFGSXXXXNLXXXAGXXRXAGGAFGKXXQAEEERYFRAXAXEQLAALKKXXEXEIXXXXKEIEXLQKEIERHKQXIKKLKHDDD

SEQ ID NO: 26 - protein, 108 aa, Artificial Sequence
  Designed; as detailed elsewhere in present application
  MISC_FEATURE (3)..(3): Xaa at this position is a single (one, 1) amino acid selected from the following options: Val Ala Thr
  MISC_FEATURE (4)..(4): Xaa at this position is a single (one, 1) amino acid selected from the following options: Thr Val
  MISC_FEATURE (5)..(5): Xaa at this position is a single (one, 1) amino acid selected from the following options: Ala Glu
  MISC_FEATURE (7)..(7): Xaa at this position is a single (one, 1) amino acid selected from the following options: Ala Val
  MISC_FEATURE (9)..(9): Xaa at this position is a single (one, 1) amino acid selected from the following options: Arg Trp
  MISC_FEATURE (10)..(10): Xaa at this position is a single (one, 1) amino acid selected from the following options: Thr Met Val
  MISC_FEATURE (11)..(11): Xaa at this position is a single (one, 1) amino acid selected from the following options: Arg Trp Gln
  MISC_FEATURE (12)..(12): Xaa at this position is a single (one, 1) amino acid selected from the following options: Leu Phe
  MISC_FEATURE (13)..(13): Xaa at this position is a single (one, 1) amino acid selected from the following options: Gly Arg Tyr Cys
  MISC_FEATURE (14)..(14): Xaa at this position is a single (one, 1) amino acid selected from the following options: Val Ser Ala
  MISC_FEATURE (15)..(15): Xaa at this position is a single (one, 1) amino acid selected from the following options: Trp Leu
  MISC_FEATURE (16)..(16): Xaa at this position is a single (one, 1) amino acid selected from the following options: Gly Ser
  MISC_FEATURE (17)..(17): Xaa at this position is a single (one, 1) amino acid selected from the following options: Val Ala
  MISC_FEATURE (18)..(18): Xaa at this position is a single (one, 1) amino acid selected from the following options: Trp Arg
  MISC_FEATURE (19)..(19): Xaa at this position is a single (one, 1) amino acid selected from the following options: Ala Thr Val
  MISC_FEATURE (20)..(20): Xaa at this position is a single (one, 1) amino acid selected from the following options: Met Val
  MISC_FEATURE (22)..(22): Xaa at this position is a single (one, 1) amino acid selected from the following options: Gly Ala
  MISC_FEATURE (23)..(23): Xaa at this position is a single (one, 1) amino acid selected from the following options: Arg Gln Leu
  MISC_FEATURE (24)..(24): Xaa at this position is a single (one, 1) amino acid selected from the following options: Gly Met
  MISC_FEATURE (25)..(25): Xaa at this position is a single (one, 1) amino acid selected from the following options: Phe Gln
  MISC_FEATURE (26)..(26): Xaa at this position is a single (one, 1) amino acid selected from the following options: Gly Ser
  MISC_FEATURE (28)..(28): Xaa at this position is a single (one, 1) amino acid selected from the following options: Glu Asp
  MISC_FEATURE (29)..(29): Xaa at this position is a single (one, 1) amino acid selected from the following options: Ser Pro Gln
  MISC_FEATURE (30)..(30): Xaa at this position is a single (one, 1) amino acid selected from the following options: Ala Ser Pro
  MISC_FEATURE (31)..(31): Xaa at this position is a single (one, 1) amino acid selected from the following options: Asp Glu His
  MISC_FEATURE (32)..(32): Xaa at this position is a single (one, 1) amino acid selected from the following options: Asn Asp
  MISC_FEATURE (33)..(33): Xaa at this position is a single (one, 1) amino acid selected from the following options: Leu Val
  MISC_FEATURE (34)..(34): Xaa at this position is a single (one, 1) amino acid selected from the following options: Gly Asp Arg
  MISC_FEATURE (35)..(35): Xaa at this position is a single (one, 1) amino acid selected from the following options: Ser Arg
  MISC_FEATURE (36)..(36): Xaa at this position is a single (one, 1) amino acid selected from the following options: Ser Gly Arg Thr
  MISC_FEATURE (37)..(37): Xaa at this position is a single (one, 1) amino acid selected from the following options: Ala Glu
  MISC_FEATURE (38)..(38): Xaa at this position is a single (one, 1) amino acid selected from the following options: Gly Ala
  MISC_FEATURE (39)..(39): Xaa at this position is a single (one, 1) amino acid selected from the following options: Gly Pro Ala Val Leu Ile Met Cys Phe Tyr Trp His Lys Arg Gln Asn Glu Asp Ser Thr
  MISC_FEATURE (40)..(40): Xaa at this position is a single (one, 1) amino acid selected from the following options: Val Ile
  MISC_FEATURE (41)..(41): Xaa at this position is a single (one, 1) amino acid selected from the following options: Arg Trp
  MISC_FEATURE (42)..(42): Xaa at this position is a single (one, 1) amino acid selected from the following options: Asp Glu Asn
  MISC_FEATURE (45)..(45): Xaa at this position is a single (one, 1) amino acid selected from the following options: Gly Val
  MISC_FEATURE (46)..(46): Xaa at this position is a single (one, 1) amino acid selected from the following options: Ala Asp
  MISC_FEATURE (48)..(48): Xaa at this position is a single (one, 1) amino acid selected from the following options: Gly Arg Ala
  MISC_FEATURE (50)..(50): Xaa at this position is a single (one, 1) amino acid selected from the following options: Arg Lys
  MISC_FEATURE (51)..(51): Xaa at this position is a single (one, 1) amino acid selected from the following options: Gly Pro Ala Val Leu Ile Met Cys Phe Tyr Trp His Lys Arg Gln Asn Glu Asp Ser Thr
  MISC_FEATURE (52)..(52): Xaa at this position is a single (one, 1) amino acid selected from the following options: Gln Ala
  MISC_FEATURE (54)..(54): Xaa at this position is a single (one, 1) amino acid selected from the following options: Glu Lys
  MISC_FEATURE (55)..(55): Xaa at this position is a single (one, 1) amino acid selected from the following options: Glu Gly
  MISC_FEATURE (56)..(56): Xaa at this position is a single (one, 1) amino acid selected from the following options: Glu Gln
  MISC_FEATURE (59)..(59): Xaa at this position is a single (one, 1) amino acid selected from the following options: Phe Leu
  MISC_FEATURE (62)..(62): Xaa at this position is a single (one, 1) amino acid selected from the following options: Arg Gln Cys
  MISC_FEATURE (63)..(63): Xaa at this position is a single (one, 1) amino acid selected from the following options: Ala Ser
  MISC_FEATURE (64)..(64): Xaa at this position is a single (one, 1) amino acid selected from the following options: Lys Arg
  MISC_FEATURE (69)..(69): Xaa at this position is a single (one, 1) amino acid selected from the following options: Ala Thr
  MISC_FEATURE (73)..(73): Xaa at this position is a single (one, 1) amino acid selected from the following options: Gly Pro Ala Val Leu Ile Met Cys Phe Tyr Trp His Lys Arg Gln Asn Glu Asp Ser Thr
  MISC_FEATURE (74)..(74): Xaa at this position is a single (one, 1) amino acid selected from the following options: Gly Pro Ala Val Leu Ile Met Cys Phe Tyr Trp His Lys Arg Gln Asn Glu Asp Ser Thr
  MISC_FEATURE (76)..(76): Xaa at this position is a single (one, 1) amino acid selected from the following options: Asn Glu
  MISC_FEATURE (79)..(79): Xaa at this position is a single (one, 1) amino acid selected from the following options: Ser Val Thr
  MISC_FEATURE (80)..(80): Xaa at this position is a single (one, 1) amino acid selected from the following options: Gly Pro Ala Val Leu Ile Met Cys Phe Tyr Trp His Lys Arg Gln Asn Glu Asp Ser Thr
  MISC_FEATURE (81)..(81): Xaa at this position is a single (one, 1) amino acid selected from the following options: Gly Pro Ala Val Leu Ile Met Cys Phe Tyr Trp His Lys Arg Gln Asn Glu Asp Ser Thr
  MISC_FEATURE (82)..(82): Xaa at this position is a single (one, 1) amino acid selected from the following options: Val Lys Met Glu
  MISC_FEATURE (87)..(87): Xaa at this position is a single (one, 1) amino acid selected from the following options: His Arg Cys
  MISC_FEATURE (90)..(90): Xaa at this position is a single (one, 1) amino acid selected from the following options: Lys Asn
  MISC_FEATURE (92)..(92): Xaa at this position is a single (one, 1) amino acid selected from the following options: Ile Met
  MISC_FEATURE (94)..(94): Xaa at this position is a single (one, 1) amino acid selected from the following options: Arg Glu
  MISC_FEATURE (98)..(98): Xaa at this position is a single (one, 1) amino acid selected from the following options: Ser Lys Leu
  MISC_FEATURE (99)..(99): Xaa at this position is a single (one, 1) amino acid selected from the following options: Ile Val
  MISC_FEATURE (101)..(101): Xaa at this position is a single (one, 1) amino acid selected from the following options: Lys Met
  MISC_FEATURE (104)..(104): Xaa at this position is a single (one, 1) amino acid selected from the following options: His Gln
  MISC_FEATURE (105)..(105): Xaa at this position is a single (one, 1) amino acid selected from the following options: Asp His
  MISC_FEATURE (107)..(107): Asp or is absent (no amino acid at this position and so this position is not present)
  MISC_FEATURE (108)..(108): Asp or is absent (no amino acid at this position and so this position is not present)
MAXXXLXAXXXXXXXXXXXXQXXXXXSXXXXXXXXXXXXXXXAGXXFXKXXXAXXXRYXRAXXXEQLAXLKKXXEXEIXXXXKEIEXLQXEXEXHKQXXKXLKXXDXX

SEQ ID NO: 27 - protein, 108 aa, Artificial Sequence
  Designed; as detailed elsewhere in present application
  MISC_FEATURE (16)..(16): Xaa at this position is a single (one, 1) amino acid selected from the following options: Gly Ser
  MISC_FEATURE (18)..(18): Xaa at this position is a single (one, 1) amino acid selected from the following options: Trp Arg
  MISC_FEATURE (19)..(19): Xaa at this position is a single (one, 1) amino acid selected from the following options: Ala Thr
  MISC_FEATURE (22)..(22): Xaa at this position is a single (one, 1) amino acid selected from the following options: Gly Ala
  MISC_FEATURE (23)..(23): Xaa at this position is a single (one, 1) amino acid selected from the following options: Arg Gln
  MISC_FEATURE (26)..(26): Xaa at this position is a single (one, 1) amino acid selected from the following options: Gly Ser
  MISC_FEATURE (28)..(28): Xaa at this position is a single (one, 1) amino acid selected from the following options: Glu Asp
  MISC_FEATURE (29)..(29): Xaa at this position is a single (one, 1) amino acid selected from the following options: Ser Gln
  MISC_FEATURE (30)..(30): Xaa at this position is a single (one, 1) amino acid selected from the following options: Ala Ser
  MISC_FEATURE (31)..(31): Xaa at this position is a single (one, 1) amino acid selected from the following options: Asp Glu
  MISC_FEATURE (32)..(32): Xaa at this position is a single (one, 1) amino acid selected from the following options: Asn Asp
  MISC_FEATURE (34)..(34): Xaa at this position is a single (one, 1) amino acid selected from the following options: Gly Asp
  MISC_FEATURE (35)..(35): Xaa at this position is a single (one, 1) amino acid selected from the following options: Ser Arg
  MISC_FEATURE (36)..(36): Xaa at this position is a single (one, 1) amino acid selected from the following options: Ser Gly
  MISC_FEATURE (39)..(39): Xaa at this position is a single (one, 1) amino acid selected from the following options: Gly Pro Ala Val Leu Ile Met Cys Phe Tyr Trp His Lys Arg Gln Asn Glu Asp Ser Thr
  MISC_FEATURE (40)..(40): Xaa at this position is a single (one, 1) amino acid selected from the following options: Val Ile
  MISC_FEATURE (41)..(41): Xaa at this position is a single (one, 1) amino acid selected from the following options: Arg Trp
  MISC_FEATURE (42)..(42): Xaa at this position is a single (one, 1) amino acid selected from the following options: Asp Glu
  MISC_FEATURE (45)..(45): Xaa at this position is a single (one, 1) amino acid selected from the following options: Gly Val
  MISC_FEATURE (46)..(46): Xaa at this position is a single (one, 1) amino acid selected from the following options: Ala Asp
  MISC_FEATURE (48)..(48): Xaa at this position is a single (one, 1) amino acid selected from the following options: Gly Ala
  MISC_FEATURE (50)..(50): Xaa at this position is a single (one, 1) amino acid selected from the following options: Arg Lys
  MISC_FEATURE (51)..(51): Xaa at this position is a single (one, 1) amino acid selected from the following options: Gly Pro Ala Val Leu Ile Met Cys Phe Tyr Trp His Lys Arg Gln Asn Glu Asp Ser Thr
  MISC_FEATURE (52)..(52): Xaa at this position is a single (one, 1) amino acid selected from the following options: Gln Ala
  MISC_FEATURE (54)..(54): Xaa at this position is a single (one, 1) amino acid selected from the following options: Glu Lys
  MISC_FEATURE (55)..(55): Xaa at this position is a single (one, 1) amino acid selected from the following options: Glu Gly
  MISC_FEATURE (56)..(56): Xaa at this position is a single (one, 1) amino acid selected from the following options: Glu Gln
  MISC_FEATURE (59)..(59): Xaa at this position is a single (one, 1) amino acid selected from the following options: Phe Leu
  MISC_FEATURE (62)..(62): Xaa at this position is a single (one, 1) amino acid selected from the following options: Arg Gln
  MISC_FEATURE (63)..(63): Xaa at this position is a single (one, 1) amino acid selected from the following options: Ala Ser
  MISC_FEATURE (64)..(64): Xaa at this position is a single (one, 1) amino acid selected from the following options: Lys Arg
  MISC_FEATURE (73)..(73): Xaa at this position is a single (one, 1) amino acid selected from the following options: Gly Pro Ala Val Leu Ile Met Cys Phe Tyr Trp His Lys Arg Gln Asn Glu Asp Ser Thr
  MISC_FEATURE (74)..(74): Xaa at this position is a single (one, 1) amino acid selected from the following options: Gly Pro Ala Val Leu Ile Met Cys Phe Tyr Trp His Lys Arg Gln Asn Glu Asp Ser Thr
  MISC_FEATURE (76)..(76): Xaa at this position is a single (one, 1) amino acid selected from the following options: Asn Glu
  MISC_FEATURE (79)..(79): Xaa at this position is a single (one, 1) amino acid selected from the following options: Ser Val
  MISC_FEATURE (80)..(80): Xaa at this position is a single (one, 1) amino acid selected from the following options: Gly Pro Ala Val Leu Ile Met Cys Phe Tyr Trp His Lys Arg Gln Asn Glu Asp Ser Thr
  MISC_FEATURE (81)..(81): Xaa at this position is a single (one, 1) amino acid selected from the following options: Gly Pro Ala Val Leu Ile Met Cys Phe Tyr Trp His Lys Arg Gln Asn Glu Asp Ser Thr
  MISC_FEATURE (82)..(82): Xaa at this position is a single (one, 1) amino acid selected from the following options: Val Lys
  MISC_FEATURE (87)..(87): Xaa at this position is a single (one, 1) amino acid selected from the following options: His Arg
  MISC_FEATURE (98)..(98): Xaa at this position is a single (one, 1) amino acid selected from the following options: Ser Lys
  MISC_FEATURE (101)..(101): Xaa at this position is a single (one, 1) amino acid selected from the following options: Lys Met
  MISC_FEATURE (108)..(108): Asp or is absent (no amino acid at this position and so this position is not present)
MAATALAARTRFGVWXVXXMQXXGFXSXXXXXLXXXAGXXXXAGXXFXKXXXAXXXRYXRAXXXEQLAALKKXXEXEIXXXXKEIEXLQKEIERHKQXIKXLKHDDDX

SEQ ID NO: 28 - protein, 107 aa, Artificial Sequence
  Designed; as detailed elsewhere in present application
  MISC_FEATURE (3)..(3): Xaa at this position is a single (one, 1) amino acid selected from the following options: Ala Val
  MISC_FEATURE (4)..(4): Xaa at this position is a single (one, 1) amino acid selected from the following options: Thr Val
  MISC_FEATURE (7)..(7): Xaa at this position is a single (one, 1) amino acid selected from the following options: Ala Val
  MISC_FEATURE (9)..(9): Xaa at this position is a single (one, 1) amino acid selected from the following options: Arg Trp
  MISC_FEATURE (10)..(10): Xaa at this position is a single (one, 1) amino acid selected from the following options: Thr Met
  MISC_FEATURE (11)..(11): Xaa at this position is a single (one, 1) amino acid selected from the following options: Arg Gln Trp
  MISC_FEATURE (12)..(12): Xaa at this position is a single (one, 1) amino acid selected from the following options: Phe Leu
  MISC_FEATURE (13)..(13): Xaa at this position is a single (one, 1) amino acid selected from the following options: Gly Arg
  MISC_FEATURE (16)..(16): Xaa at this position is a single (one, 1) amino acid selected from the following options: Gly Ser
  MISC_FEATURE (18)..(18): Xaa at this position is a single (one, 1) amino acid selected from the following options: Arg Trp
  MISC_FEATURE (19)..(19): Xaa at this position is a single (one, 1) amino acid selected from the following options: Thr Val Ala
  MISC_FEATURE (22)..(22): Xaa at this position is a single (one, 1) amino acid selected from the following options: Gly Ala
  MISC_FEATURE (23)..(23): Xaa at this position is a single (one, 1) amino acid selected from the following options: Arg Leu
  MISC_FEATURE (28)..(28): Xaa at this position is a single (one, 1) amino acid selected from the following options: Glu Asp
  MISC_FEATURE (29)..(29): Xaa at this position is a single (one, 1) amino acid selected from the following options: Ser Pro Gln
  MISC_FEATURE (30)..(30): Xaa at this position is a single (one, 1) amino acid selected from the following options: Ala Ser
  MISC_FEATURE (31)..(31): Xaa at this position is a single (one, 1) amino acid selected from the following options: Asp Glu
  MISC_FEATURE (33)..(33): Xaa at this position is a single (one, 1) amino acid selected from the following options: Leu Val
  MISC_FEATURE (34)..(34): Xaa at this position is a single (one, 1) amino acid selected from the following options: Gly Asp
  MISC_FEATURE (35)..(35): Xaa at this position is a single (one, 1) amino acid selected from the following options: Ser Arg
  MISC_FEATURE (36)..(36): Xaa at this position is a single (one, 1) amino acid selected from the following options: Ser Gly
  MISC_FEATURE (37)..(37): Xaa at this position is a single (one, 1) amino acid selected from the following options: Ala Glu
  MISC_FEATURE (38)..(38): Xaa at this position is a single (one, 1) amino acid selected from the following options: Gly Ala
  MISC_FEATURE (39)..(39): Xaa at this position is a single (one, 1) amino acid selected from the following options: Gly Pro Ala Val Leu Ile Met Cys Phe Tyr Trp His Lys Arg Gln Asn Glu Asp Ser Thr
  MISC_FEATURE (40)..(40): Xaa at this position is a single (one, 1) amino acid selected from the following options: Trp Val Ile
  MISC_FEATURE (41)..(41): Xaa at this position is a single (one, 1) amino acid selected from the following options: Arg Trp
  MISC_FEATURE (42)..(42): Xaa at this position is a single (one, 1) amino acid selected from the following options: Asn Glu Asp
  MISC_FEATURE (45)..(45): Xaa at this position is a single (one, 1) amino acid selected from the following options: Gly Val
  MISC_FEATURE (46)..(46): Xaa at this position is a single (one, 1) amino acid selected from the following options: Ala Asp
  MISC_FEATURE (48)..(48): Xaa at this position is a single (one, 1) amino acid selected from the following options: Gly Arg
  MISC_FEATURE (50)..(50): Xaa at this position is a single (one, 1) amino acid selected from the following options: Lys Arg
  MISC_FEATURE (51)..(51): Xaa at this position is a single (one, 1) amino acid selected from the following options: Gly Pro Ala Val Leu Ile Met Cys Phe Tyr Trp His Lys Arg Gln Asn Glu Asp Ser Thr
  MISC_FEATURE (54)..(54): Xaa at this position is a single (one, 1) amino acid selected from the following options: Glu Lys
  MISC_FEATURE (55)..(55): Xaa at this position is a single (one, 1) amino acid selected from the following options: Glu Gly
  MISC_FEATURE (59)..(59): Xaa at this position is a single (one, 1) amino acid selected from the following options: Phe Leu
  MISC_FEATURE (62)..(62): Xaa at this position is a single (one, 1) amino acid selected from the following options: Arg Gln
  MISC_FEATURE (63)..(63): Xaa at this position is a single (one, 1) amino acid selected from the following options: Ala Ser
  MISC_FEATURE (64)..(64): Xaa at this position is a single (one, 1) amino acid selected from the following options: Lys Arg
  MISC_FEATURE (73)..(73): Xaa at this position is a single (one, 1) amino acid selected from the following options: Gly Pro Ala Val Leu Ile Met Cys Phe Tyr Trp His Lys Arg Gln Asn Glu Asp Ser Thr
  MISC_FEATURE (74)..(74): Xaa at this position is a single (one, 1) amino acid selected from the following options: Gly Pro Ala Val Leu Ile Met Cys Phe Tyr Trp His Lys Arg Gln Asn Glu Asp Ser Thr
  MISC_FEATURE (76)..(76): Xaa at this position is a single (one, 1) amino acid selected from the following options: Asn Glu
  MISC_FEATURE (79)..(79): Xaa at this position is a single (one, 1) amino acid selected from the following options: Ser Val
  MISC_FEATURE (80)..(80): Xaa at this position is a single (one, 1) amino acid selected from the following options: Gly Pro Ala Val Leu Ile Met Cys Phe Tyr Trp His Lys Arg Gln Asn Glu Asp Ser Thr
  MISC_FEATURE (81)..(81): Xaa at this position is a single (one, 1) amino acid selected from the following options: Gly Pro Ala Val Leu Ile Met Cys Phe Tyr Trp His Lys Arg Gln Asn Glu Asp Ser Thr
  MISC_FEATURE (82)..(82): Xaa at this position is a single (one, 1) amino acid selected from the following options: Val Lys
  MISC_FEATURE (87)..(87): Xaa at this position is a single (one, 1) amino acid selected from the following options: Arg His
  MISC_FEATURE (98)..(98): Xaa at this position is a single (one, 1) amino acid selected from the following options: Lys Ser
  MISC_FEATURE (101)..(101): Xaa at this position is a single (one, 1) amino acid selected from the following options: Met Lys
  MISC_FEATURE (107)..(107): Asp or is absent (no amino acid at this position and so this position is not present)
MAXXALXAXXXXXVWXVXXMQXXGFGSXXXXNXXXXXXXXXXAGXXFXKXXQAXXERYXRAXXXEQLAALKKXXEXEIXXXXKEIEXLQKEIERHKQXIKXLKHDDX

SEQ ID NO: 29 - protein, 107 aa, Artificial Sequence
  Designed; as detailed elsewhere in present application
  MISC_FEATURE (39)..(39): Xaa at this position is a single (one, 1) amino acid selected from the following options: Gly Pro Ala Val Leu Ile Met Cys Phe Tyr Trp His Lys Arg Gln Asn Glu Asp Ser Thr
  MISC_FEATURE (51)..(51): Xaa at this position is a single (one, 1) amino acid selected from the following options: Gly Pro Ala Val Leu Ile Met Cys Phe Tyr Trp His Lys Arg Gln Asn Glu Asp Ser Thr
  MISC_FEATURE (73)..(73): Xaa at this position is a single (one, 1) amino acid selected from the following options: Gly Pro Ala Val Leu Ile Met Cys Phe Tyr Trp His Lys Arg Gln Asn Glu Asp Ser Thr
  MISC_FEATURE (74)..(74): Xaa at this position is a single (one, 1) amino acid selected from the following options: Gly Pro Ala Val Leu Ile Met Cys Phe Tyr Trp His Lys Arg Gln Asn Glu Asp Ser Thr
  MISC_FEATURE (80)..(80): Xaa at this position is a single (one, 1) amino acid selected from the following options: Gly Pro Ala Val Leu Ile Met Cys Phe Tyr Trp His Lys Arg Gln Asn Glu Asp Ser Thr
  MISC_FEATURE (81)..(81): Xaa at this position is a single (one, 1) amino acid selected from the following options: Gly Pro Ala Val Leu Ile Met Cys Phe Tyr Trp His Lys Arg Gln Asn Glu Asp Ser Thr
MAATALAARTRFGVWSVWAMQGRGFGSESADNLGSSAGXIRDAGGAFGKKXQAEEERYFRARAKEQLAALKKXXENEISXXVKEIEHLQKEIERHKQSIKKLKHDDD

SEQ ID NO: 30 - protein, 107 aa, Artificial Sequence
  Designed; as detailed elsewhere in present application
  MISC_FEATURE (3)..(3): Xaa at this position is a single (one, 1) amino acid selected from the following options: Val Gly Ala Thr
  MISC_FEATURE (4)..(4): Xaa at this position is a single (one, 1) amino acid selected from the following options: Thr Ser Pro
  MISC_FEATURE (5)..(5): Xaa at this position is a single (one, 1) amino acid selected from the following options: Ala Val Glu
  MISC_FEATURE (6)..(6): Xaa at this position is a single (one, 1) amino acid selected from the following options: Leu Thr Gln
  MISC_FEATURE (7)..(7): Xaa at this position is a single (one, 1) amino acid selected from the following options: Ala Val
  MISC_FEATURE (8)..(8): Xaa at this position is a single (one, 1) amino acid selected from the following options: Ala Val Leu Ile Thr
  MISC_FEATURE (9)..(9): Xaa at this position is a single (one, 1) amino acid selected from the following options: Arg Gln Trp
  MISC_FEATURE (10)..(10): Xaa at this position is a single (one, 1) amino acid selected from the following options: Thr Val Met Ala Ser Leu
  MISC_FEATURE (11)..(11): Xaa at this position is a single (one, 1) amino acid selected from the following options: Trp Arg Gln
  MISC_FEATURE (12)..(12): Xaa at this position is a single (one, 1) amino acid selected from the following options: Leu Phe Gln
  MISC_FEATURE (13)..(13): Xaa at this position is a single (one, 1) amino acid selected from the following options: Gly Tyr Cys Ala Arg
  MISC_FEATURE (14)..(14): Xaa at this position is a single (one, 1) amino acid selected from the following options: Val Ser Ala Thr Met Arg
  MISC_FEATURE (15)..(15): Xaa at this position is a single (one, 1) amino acid selected from the following options: Trp Leu
  MISC_FEATURE (16)..(16): Xaa at this position is a single (one, 1) amino acid selected from the following options: Gly Ser
  MISC_FEATURE (17)..(17): Xaa at this position is a single (one, 1) amino acid selected from the following options: Val Ala Met
  MISC_FEATURE (18)..(18): Xaa at this position is a single (one, 1) amino acid selected from the following options: Arg Trp Lys Leu
  MISC_FEATURE (19)..(19): Xaa at this position is a single (one, 1) amino acid selected from the following options: Thr Ala Val Ser
  MISC_FEATURE (20)..(20): Xaa at this position is a single (one, 1) amino acid selected from the following options: Met Leu Ile Arg Val Ala Thr
  MISC_FEATURE (21)..(21): Xaa at this position is a single (one, 1) amino acid selected from the following options: Gln Arg
  MISC_FEATURE (22)..(22): Xaa at this position is a single (one, 1) amino acid selected from the following options: Ala Thr Gly Ser
  MISC_FEATURE (23)..(23): Xaa at this position is a single (one, 1) amino acid selected from the following options: Arg Gln Gly Leu
  MISC_FEATURE (24)..(24): Xaa at this position is a single (one, 1) amino acid selected from the following options: Gly Ser
  MISC_FEATURE (25)..(25): Xaa at this position is a single (one, 1) amino acid selected from the following options: Phe Tyr
  MISC_FEATURE (39)..(39): Xaa at this position is a single (one, 1) amino acid selected from the following options: Gly Pro Ala Val Leu Ile Met Cys Phe Tyr Trp His Lys Arg Gln Asn Glu Asp Ser Thr
  MISC_FEATURE (51)..(51): Xaa at this position is a single (one, 1) amino acid selected from the following options: Gly Pro Ala Val Leu Ile Met Cys Phe Tyr Trp His Lys Arg Gln Asn Glu Asp Ser Thr
  MISC_FEATURE (73)..(73): Xaa at this position is a single (one, 1) amino acid selected from the following options: Gly Pro Ala Val Leu Ile Met Cys Phe Tyr Trp His Lys Arg Gln Asn Glu Asp Ser Thr
  MISC_FEATURE (74)..(74): Xaa at this position is a single (one, 1) amino acid selected from the following options: Gly Pro Ala Val Leu Ile Met Cys Phe Tyr Trp His Lys Arg Gln Asn Glu Asp Ser Thr
  MISC_FEATURE (80)..(80): Xaa at this position is a single (one, 1) amino acid selected from the following options: Gly Pro Ala Val Leu Ile Met Cys Phe Tyr Trp His Lys Arg Gln Asn Glu Asp Ser Thr
  MISC_FEATURE (81)..(81): Xaa at this position is a single (one, 1) amino acid selected from the following options: Gly Pro Ala Val Leu Ile Met Cys Phe Tyr Trp His Lys Arg Gln Asn Glu Asp Ser Thr
MAXXXXXXXXXXXXXXXXXXXXXXXGSESADNLGSSAGXIRDAGGAFGKKXQAEEERYFRARAKEQLAALKKXXENEISXXVKEIEHLQKEIERHKQSIKKLKHDDD

SEQ ID NO: 31 - protein, 107 aa, Artificial Sequence
  Designed; as detailed elsewhere in present application
  MISC_FEATURE (39)..(39): Xaa at this position is a single (one, 1) amino acid selected from the following options: Gly Pro Ala Val Leu Ile Met Cys Phe Tyr Trp His Lys Arg Gln Asn Glu Asp Ser Thr
  MISC_FEATURE (51)..(51): Xaa at this position is a single (one, 1) amino acid selected from the following options: Gly Pro Ala Val Leu Ile Met Cys Phe Tyr Trp His Lys Arg Gln Asn Glu Asp Ser Thr
  MISC_FEATURE (73)..(73): Xaa at this position is a single (one, 1) amino acid selected from the following options: Gly Pro Ala Val Leu Ile Met Cys Phe Tyr Trp His Lys Arg Gln Asn Glu Asp Ser Thr
  MISC_FEATURE (74)..(74): Xaa at this position is a single (one, 1) amino acid selected from the following options: Gly Pro Ala Val Leu Ile Met Cys Phe Tyr Trp His Lys Arg Gln Asn Glu Asp Ser Thr
  MISC_FEATURE (80)..(80): Xaa at this position is a single (one, 1) amino acid selected from the following options: Gly Pro Ala Val Leu Ile Met Cys Phe Tyr Trp His Lys Arg Gln Asn Glu Asp Ser Thr
  MISC_FEATURE (81)..(81): Xaa at this position is a single (one, 1) amino acid selected from the following options: Gly Pro Ala Val Leu Ile Met Cys Phe Tyr Trp His Lys Arg Gln Asn Glu Asp Ser Thr
MAVTALAARTWLGVWGVRTMQARGFGSESADNLGSSAGXIRDAGGAFGKKXQAEEERYFRARAKEQLAALKKXXENEISXXVKEIEHLQKEIERHKQSIKKLKHDDD

SEQ ID NO: 32 - protein, 107 aa, Artificial Sequence
  Designed; as detailed elsewhere in present application
  MISC_FEATURE (39)..(39): Xaa at this position is a single (one, 1) amino acid selected from the following options: Gly Pro Ala Val Leu Ile Met Cys Phe Tyr Trp His Lys Arg Gln Asn Glu Asp Ser Thr
  MISC_FEATURE (51)..(51): Xaa at this position is a single (one, 1) amino acid selected from the following options: Gly Pro Ala Val Leu Ile Met Cys Phe Tyr Trp His Lys Arg Gln Asn Glu Asp Ser Thr
  MISC_FEATURE (73)..(73): Xaa at this position is a single (one, 1) amino acid selected from the following options: Gly Pro Ala Val Leu Ile Met Cys Phe Tyr Trp His Lys Arg Gln Asn Glu Asp Ser Thr
  MISC_FEATURE (74)..(74): Xaa at this position is a single (one, 1) amino acid selected from the following options: Gly Pro Ala Val Leu Ile Met Cys Phe Tyr Trp His Lys Arg Gln Asn Glu Asp Ser Thr
  MISC_FEATURE (80)..(80): Xaa at this position is a single (one, 1) amino acid selected from the following options: Gly Pro Ala Val Leu Ile Met Cys Phe Tyr Trp His Lys Arg Gln Asn Glu Asp Ser Thr
  MISC_FEATURE (81)..(81): Xaa at this position is a single (one, 1) amino acid selected from the following options: Gly Pro Ala Val Leu Ile Met Cys Phe Tyr Trp His Lys Arg Gln Asn Glu Asp Ser Thr
MAGSALAVRARFGVWGMKVLQTRGFGSESADNLGSSAGXIRDAGGAFGKKXQAEEERYFRARAKEQLAALKKXXENEISXXVKEIEHLQKEIERHKQSIKKLKHDDD

SEQ ID NO: 33 - protein, 110 aa, Artificial Sequence
  Designed; as detailed elsewhere in present application
  MISC_FEATURE (3)..(3): Xaa at this position is a single (one, 1) amino acid selected from the following options: Val Gly Ala Thr
  MISC_FEATURE (4)..(4): Xaa at this position is a single (one, 1) amino acid selected from the following options: Thr Ser Pro
  MISC_FEATURE (5)..(5): Xaa at this position is a single (one, 1) amino acid selected from the following options: Glu Ala Val
  MISC_FEATURE (6)..(6): Xaa at this position is a single (one, 1) amino acid selected from the following options: Leu Thr Gln
  MISC_FEATURE (7)..(7): Xaa at this position is a single (one, 1) amino acid selected from the following options: Ala Val
  MISC_FEATURE (8)..(8): Xaa at this position is a single (one, 1) amino acid selected from the following options: Ala Val Leu Ile Thr
  MISC_FEATURE (9)..(9): Xaa at this position is a single (one, 1) amino acid selected from the following options: Trp Arg Gln
  MISC_FEATURE (10)..(10): Xaa at this position is a single (one, 1) amino acid selected from the following options: Thr Val Met Ala Ser Leu
  MISC_FEATURE (11)..(11): Xaa at this position is a single (one, 1) amino acid selected from the following options: Gln Trp Arg
  MISC_FEATURE (12)..(12): Xaa at this position is a single (one, 1) amino acid selected from the following options: Leu Phe Gln
  MISC_FEATURE (13)..(13): Xaa at this position is a single (one, 1) amino acid selected from the following options: Arg Gly Tyr Cys Ala
  MISC_FEATURE (14)..(14): Xaa at this position is a single (one, 1) amino acid selected from the following options: Val Ser Ala Thr Met Arg
  MISC_FEATURE (15)..(15): Xaa at this position is a single (one, 1) amino acid selected from the following options: Trp Leu
  MISC_FEATURE (16)..(16): Xaa at this position is a single (one, 1) amino acid selected from the following options: Gly Ser
  MISC_FEATURE (17)..(17): Xaa at this position is a single (one, 1) amino acid selected from the following options: Val Ala Met
  MISC_FEATURE (18)..(18): Xaa at this position is a single (one, 1) amino acid selected from the following options: Arg Trp Lys Leu
  MISC_FEATURE (19)..(19): Xaa at this position is a single (one, 1) amino acid selected from the following options: Thr Ala Val Ser
  MISC_FEATURE (20)..(20): Xaa at this position is a single (one, 1) amino acid selected from the following options: Met Leu Ile Arg Val Ala Thr
  MISC_FEATURE (21)..(21): Xaa at this position is a single (one, 1) amino acid selected from the following options: Gln Arg
  MISC_FEATURE (22)..(22): Xaa at this position is a single (one, 1) amino acid selected from the following options: Ala Thr Gly Ser
  MISC_FEATURE (23)..(23): Xaa at this position is a single (one, 1) amino acid selected from the following options: Leu Arg Gln Gly
  MISC_FEATURE (24)..(24): Xaa at this position is a single (one, 1) amino acid selected from the following options: Gly Ser
  MISC_FEATURE (25)..(25): Xaa at this position is a single (one, 1) amino acid selected from the following options: Phe Tyr
  MISC_FEATURE (26)..(26): Xaa at this position is a single (one, 1) amino acid selected from the following options: Gly Ser Val Ala Thr Leu Arg Phe Ile Lys Met Gln Asn
  MISC_FEATURE (27)..(27): Xaa at this position is a single (one, 1) amino acid selected from the following options: Ser Cys Arg Gly Phe Thr Pro
  MISC_FEATURE (28)..(28): Xaa at this position is a single (one, 1) amino acid selected from the following options: Asp Glu Gly Ser Phe Lys Thr Leu Phe Pro
  MISC_FEATURE (29)..(29): Xaa at this position is a single (one, 1) amino acid selected from the following options: Pro Gln Arg Ser Thr Lys Gly Glu Ala Phe
  MISC_FEATURE (30)..(30): Xaa at this position is a single (one, 1) amino acid selected from the following options: Ser Pro Ala Gly Arg Glu Asp Val
  MISC_FEATURE (31)..(31): Xaa at this position is a single (one, 1) amino acid selected from the following options: Glu Asp Lys His Ala Gly Asn Ser Arg Gln Asp Thr Leu Val
  MISC_FEATURE (32)..(32): Xaa at this position is a single (one, 1) amino acid selected from the following options: Asn Asp Tyr Ser Gly Arg His Lys Glu Ala Leu
  MISC_FEATURE (33)..(33): Xaa at this position is a single (one, 1) amino acid selected from the following options: Val Leu Pro His Met Ile Phe Thr Gly Gly Ser Asp Glu Phe
  MISC_FEATURE (34)..(34): Xaa at this position is a single (one, 1) amino acid selected from the following options: Asp Gly His Arg Ser Glu Pro
  MISC_FEATURE (35)..(35): Xaa at this position is a single (one, 1) amino acid selected from the following options: Arg Ser Gly Thr Pro Ala Lys Glu
  MISC_FEATURE (36)..(36): Xaa at this position is a single (one, 1) amino acid selected from the following options: Arg Thr Gly Ser Arg Pro Lys Asp Ala
  MISC_FEATURE (37)..(37): Xaa at this position is a single (one, 1) amino acid selected from the following options: Ala Glu Ser Gly Arg
  MISC_FEATURE (38)..(38): Xaa at this position is a single (one, 1) amino acid selected from the following options: Ala Gly Gln Pro
  MISC_FEATURE (39)..(39): Xaa at this position is a single (one, 1) amino acid selected from the following options: Gly Pro Ala Val Leu Ile Met Cys Phe Tyr Trp His Lys Arg Gln Asn Glu Asp Ser Thr
  MISC_FEATURE (40)..(40): Xaa at this position is a single (one, 1) amino acid selected from the following options: Ile Val Leu Glu Phe
  MISC_FEATURE (41)..(41): Xaa at this position is a single (one, 1) amino acid selected from the following options: Trp Arg Lys Glu Thr Tyr
  MISC_FEATURE (42)..(42): Xaa at this position is a single (one, 1) amino acid selected from the following options: Asn Glu Asp Ala Lys Ser
  MISC_FEATURE (43)..(43): Xaa at this position is a single (one, 1) amino acid selected from the following options: Ala Arg Lys Cys
  MISC_FEATURE (44)..(44): Xaa at this position is a single (one, 1) amino acid selected from the following options: Gly Tyr Glu Pro
  MISC_FEATURE (45)..(45): Xaa at this position is a single (one, 1) amino acid selected from the following options: Val Gly Phe Lys Arg
  MISC_FEATURE (46)..(46): Xaa at this position is a single (one, 1) amino acid selected from the following options: Asp Ala Ser Arg Leu
  MISC_FEATURE (47)..(47): Xaa at this position is a single (one, 1) amino acid selected from the following options: Phe Leu Ile Glu Ser
  MISC_FEATURE (48)..(48): Xaa at this position is a single (one, 1) amino acid selected from the following options: Arg Gly Ala Ile Glu Ser Pro
  MISC_FEATURE (49)..(49): Xaa at this position is a single (one, 1) amino acid selected from the following options: Lys Arg Thr Glu Gln
  MISC_FEATURE (50)..(50): Xaa at this position is a single (one, 1) amino acid selected from the following options: Arg Lys Met
  MISC_FEATURE (51)..(51): Xaa at this position is a single (one, 1) amino acid selected from the following options: Gly Pro Ala Val Leu Ile Met Cys Phe Tyr Trp His Lys Arg Gln Asn Glu Asp Ser Thr
  MISC_FEATURE (52)..(52): Xaa at this position is a single (one, 1) amino acid selected from the following options: Gln Ala Lys Arg Pro Phe Val
  MISC_FEATURE (53)..(53): Xaa at this position is a single (one, 1) amino acid selected from the following options: Ala Ser Arg
  MISC_FEATURE (54)..(54): Xaa at this position is a single (one, 1) amino acid selected from the following options: Lys Glu Asp His Ala Ile
  MISC_FEATURE (55)..(55): Xaa at this position is a single (one, 1) amino acid selected from the following options: Gly Glu Pro Arg
  MISC_FEATURE (56)..(56): Xaa at this position is a single (one, 1) amino acid selected from the following options: Glu Asp Tyr Thr Gln
  MISC_FEATURE (57)..(57): Xaa at this position is a single (one, 1) amino acid selected from the following options: Arg Met Lys
  MISC_FEATURE (58)..(58): Xaa at this position is a single (one, 1) amino acid selected from the following options: Tyr Phe Glu
  MISC_FEATURE (59)..(59): Xaa at this position is a single (one, 1) amino acid selected from the following options: Leu Phe Pro Gln
  MISC_FEATURE (60)..(60): Xaa at this position is a single (one, 1) amino acid selected from the following options: Arg Leu Lys
  MISC_FEATURE (61)..(61): Xaa at this position is a single (one, 1) amino acid selected from the following options: Ala Lys Glu Thr Asp Gln Arg
  MISC_FEATURE (62)..(62): Xaa at this position is a single (one, 1) amino acid selected from the following options: Gln Arg Lys Ala Cys
  MISC_FEATURE (63)..(63): Xaa at this position is a single (one, 1) amino acid selected from the following options: Ser Thr Ala Asn Glu Leu
  MISC_FEATURE (64)..(64): Xaa at this position is a single (one, 1) amino acid selected from the following options: Arg Lys Gln His Ala
  MISC_FEATURE (65)..(65): Xaa at this position is a single (one, 1) amino acid selected from the following options: Glu Gln Lys
  MISC_FEATURE (66)..(66): Xaa at this position is a single (one, 1) amino acid selected from the following options: Gln Lys
  MISC_FEATURE (67)..(67): Xaa at this position is a single (one, 1) amino acid selected from the following options: Leu His Met Glu
  MISC_FEATURE (68)..(68): Xaa at this position is a single (one, 1) amino acid selected from the following options: Ala Leu Glu Thr Asp Ser
  MISC_FEATURE (69)..(69): Xaa at this position is a single (one, 1) amino acid selected from the following options: Ala Thr Arg Ile Ser Asn Val Met Asp
  MISC_FEATURE (70)..(70): Xaa at this position is a single (one, 1) amino acid selected from the following options: Leu Glu
  MISC_FEATURE (71)..(71): Xaa at this position is a single (one, 1) amino acid selected from the following options: Lys Arg Ile
  MISC_FEATURE (72)..(72): Xaa at this position is a single (one, 1) amino acid selected from the following options: Lys Asn Arg Thr Glu
  MISC_FEATURE (73)..(73): Xaa at this position is a single (one, 1) amino acid selected from the following options: Gly Pro Ala Val Leu Ile Met Cys Phe Tyr Trp His Lys Arg Gln Asn Glu Asp Ser Thr
  MISC_FEATURE (74)..(74): Xaa at this position is a single (one, 1) amino acid selected from the following options: Gly Pro Ala Val Leu Ile Met Cys Phe Tyr Trp His Lys Arg Gln Asn Glu Asp Ser Thr
  MISC_FEATURE (75)..(75): Xaa at this position is a single (one, 1) amino acid selected from the following options: Glu Gln Lys Val
  MISC_FEATURE (76)..(76): Xaa at this position is a single (one, 1) amino acid selected from the following options: Glu Asp Asn Lys
  MISC_FEATURE (77)..(77): Xaa at this position is a single (one, 1) amino acid selected from the following options: Glu Val
  MISC_FEATURE (78)..(78): Xaa at this position is a single (one, 1) amino acid selected from the following options: Ile Val
  MISC_FEATURE (79)..(79): Xaa at this position is a single (one, 1) amino acid selected from the following options: Val Thr Ser Asp Asn Gly Ala Glu Gln Tyr Arg
  MISC_FEATURE (80)..(80): Xaa at this position is a single (one, 1) amino acid selected from the following options: Gly Pro Ala Val Leu Ile Met Cys Phe Tyr Trp His Lys Arg Gln Asn Glu Asp Ser Thr
  MISC_FEATURE (81)..(81): Xaa at this position is a single (one, 1) amino acid selected from the following options: Gly Pro Ala Val Leu Ile Met Cys Phe Tyr Trp His Lys Arg Gln Asn Glu Asp Ser Thr
  MISC_FEATURE (82)..(82): Xaa at this position is a single (one, 1) amino acid selected from the following options: Lys Ser Met Val His Ala Arg Gln Glu Ile Leu Val
  MISC_FEATURE (83)..(83): Xaa at this position is a single (one, 1) amino acid selected from the following options: Lys Glu Gln Arg Gly
  MISC_FEATURE (84)..(84): Xaa at this position is a single (one, 1) amino acid selected from the following options: Glu Ala Gln
  MISC_FEATURE (86)..(86): Xaa at this position is a single (one, 1) amino acid selected from the following options: Glu Lys Asp Gln
  MISC_FEATURE (87)..(87): Xaa at this position is a single (one, 1) amino acid selected from the following options: Arg His Leu Gln Cys Val Gln
  MISC_FEATURE (88)..(88): Xaa at this position is a single (one, 1) amino acid selected from the following options: Leu Met
  MISC_FEATURE (89)..(89): Xaa at this position is a single (one, 1) amino acid selected from the following options: Gln Glu Lys
  MISC_FEATURE (90)..(90): Xaa at this position is a single (one, 1) amino acid selected from the following options: Lys Asn Arg Gln
  MISC_FEATURE (91)..(91): Xaa at this position is a single (one, 1) amino acid selected from the following options: Glu Gln Asn
  MISC_FEATURE (92)..(92): Xaa at this position is a single (one, 1) amino acid selected from the following options: Ile Met
  MISC_FEATURE (93)..(93): Xaa at this position is a single (one, 1) amino acid selected from the following options: Glu Gln Asp Ile Lys
  MISC_FEATURE (94)..(94): Xaa at this position is a single (one, 1) amino acid selected from the following options: Arg Gln Lys Glu
  MISC_FEATURE (95)..(95): Xaa at this position is a single (one, 1) amino acid selected from the following options: His Leu Ile
  MISC_FEATURE (96)..(96): Xaa at this position is a single (one, 1) amino acid selected from the following options: Lys Gln Glu
  MISC_FEATURE (97)..(97): Xaa at this position is a single (one, 1) amino acid selected from the following options: Gln Lys Glu Tyr Gly Ser His Asp Asn
  MISC_FEATURE (98)..(98): Xaa at this position is a single (one, 1) amino acid selected from the following options: Lys Arg Ser Ala Asn Thr His Ser Leu
  MISC_FEATURE (99)..(99): Xaa at this position is a single (one, 1) amino acid selected from the following options: Ile Met Asp Val
  MISC_FEATURE (100)..(100): Xaa at this position is a single (one, 1) amino acid selected from the following options: Lys Gln Arg Asn
  MISC_FEATURE (101)..(101): Xaa at this position is a single (one, 1) amino acid selected from the following options: Met Thr Lys His Tyr Ser Gln Ile Val Asn Asp Arg
  MISC_FEATURE (103)..(103): Xaa at this position is a single (one, 1) amino acid selected from the following options: Lys Asn Ser His Arg Thr Gly
  MISC_FEATURE (104)..(104): Xaa at this position is a single (one, 1) amino acid selected from the following options: His Asp Asn Ser Arg Gln Glu Tyr Asn Leu Gln Gly
  MISC_FEATURE (105)..(105): Xaa at this position is a single (one, 1) amino acid selected from the following options: Asp His Ser Asn Ile or is absent (no amino acid at this position and so this position is not present)
  MISC_FEATURE (106)..(106): Xaa at this position is a single (one, 1) amino acid selected from the following options: Asp Glu His Gly Asn or is absent (no amino acid at this position and so this position is not present)
  MISC_FEATURE (107)..(107): Xaa at this position is a single (one, 1) amino acid selected from the following options: Asp His or is absent (no amino acid at this position and so this position is not present)
  MISC_FEATURE (108)..(108): Xaa at this position is a single (one, 1) amino acid selected from the following options: Asp Glu or is absent (no amino acid at this position and so this position is not present)
  MISC_FEATURE (109)..(109): Asp or is absent (no amino acid at this position and so this position is not present)
  MISC_FEATURE (110)..(110): Asp or is absent (no amino acid at this position and so this position is not present)
MAXXXXXXXXXXXXXXXXXXXXXXXXXXXXXXXXXXXXXXXXXXXXXXXXXXXXXXXXXXXXXXXXXXXXXXXXXXXXXXXXXXIXXXXXXXXXXXXXXXXLXXXXXXXX

SEQ ID NO: 34 - protein, 108 aa, Artificial Sequence
  Designed; as detailed elsewhere in present application
  MISC_FEATURE (3)..(3): Xaa at this position is a single (one, 1) amino acid selected from the following options: Val Gly Ala Thr
  MISC_FEATURE (4)..(4): Xaa at this position is a single (one, 1) amino acid selected from the following options: Thr Ser Pro
  MISC_FEATURE (5)..(5): Xaa at this position is a single (one, 1) amino acid selected from the following options: Ala Val Glu
  MISC_FEATURE (6)..(6): Xaa at this position is a single (one, 1) amino acid selected from the following options: Leu Thr Gln
  MISC_FEATURE (7)..(7): Xaa at this position is a single (one, 1) amino acid selected from the following options: Ala Val
  MISC_FEATURE (8)..(8): Xaa at this position is a single (one, 1) amino acid selected from the following options: Ala Val Leu Ile Thr
  MISC_FEATURE (9)..(9): Xaa at this position is a single (one, 1) amino acid selected from the following options: Arg Gln Trp
  MISC_FEATURE (10)..(10): Xaa at this position is a single (one, 1) amino acid selected from the following options: Thr Val Met Ala Ser Leu
  MISC_FEATURE (11)..(11): Xaa at this position is a single (one, 1) amino acid selected from the following options: Trp Arg Gln
  MISC_FEATURE (12)..(12): Xaa at this position is a single (one, 1) amino acid selected from the following options: Leu Phe Gln
  MISC_FEATURE (13)..(13): Xaa at this position is a single (one, 1) amino acid selected from the following options: Gly Tyr Cys Ala Arg
  MISC_FEATURE (14)..(14): Xaa at this position is a single (one, 1) amino acid selected from the following options: Val Ser Ala Thr Met Arg
  MISC_FEATURE (15)..(15): Xaa at this position is a single (one, 1) amino acid selected from the following options: Trp Leu
  MISC_FEATURE (16)..(16): Xaa at this position is a single (one, 1) amino acid selected from the following options: Gly Ser
  MISC_FEATURE (17)..(17): Xaa at this position is a single (one, 1) amino acid selected from the following options: Val Ala Met
  MISC_FEATURE (18)..(18): Xaa at this position is a single (one, 1) amino acid selected from the following options: Arg Trp Lys Leu
  MISC_FEATURE (19)..(19): Xaa at this position is a single (one, 1) amino acid selected from the following options: Thr Ala Val Ser
  MISC_FEATURE (20)..(20): Xaa at this position is a single (one, 1) amino acid selected from the following options: Met Leu Ile Arg Val Ala Thr
  MISC_FEATURE (21)..(21): Xaa at this position is a single (one, 1) amino acid selected from the following options: Gln Arg
  MISC_FEATURE (22)..(22): Xaa at this position is a single (one, 1) amino acid selected from the following options: Ala Thr Gly Ser
  MISC_FEATURE (23)..(23): Xaa at this position is a single (one, 1) amino acid selected from the following options: Arg Gln Gly Leu
  MISC_FEATURE (24)..(24): Xaa at this position is a single (one, 1) amino acid selected from the following options: Gly Ser
  MISC_FEATURE (25)..(25): Xaa at this position is a single (one, 1) amino acid selected from the following options: Phe Tyr
  MISC_FEATURE (26)..(26): Xaa at this position is a single (one, 1) amino acid selected from the following options: Gly Leu
  MISC_FEATURE (27)..(27): Xaa at this position is a single (one, 1) amino acid selected from the following options: Ser Gly
  MISC_FEATURE (28)..(28): Xaa at this position is a single (one, 1) amino acid selected from the following options: Glu Asp Ser
  MISC_FEATURE (29)..(29): Xaa at this position is a single (one, 1) amino acid selected from the following options: Gly Ser Gln Pro
  MISC_FEATURE (30)..(30): Xaa at this position is a single (one, 1) amino acid selected from the following options: Ala Ser
  MISC_FEATURE (31)..(31): Xaa at this position is a single (one, 1) amino acid selected from the following options: Asp Gly Glu
  MISC_FEATURE (32)..(32): Xaa at this position is a single (one, 1) amino acid selected from the following options: Asn Lys
  MISC_FEATURE (33)..(33): Xaa at this position is a single (one, 1) amino acid selected from the following options: Leu Gly Val
  MISC_FEATURE (34)..(34): Xaa at this position is a single (one, 1) amino acid selected from the following options: Gly Asp
  MISC_FEATURE (35)..(35): Xaa at this position is a single (one, 1) amino acid selected from the following options: Ser Gly Arg
  MISC_FEATURE (36)..(36): Xaa at this position is a single (one, 1) amino acid selected from the following options: Ser Gly
  MISC_FEATURE (37)..(37): Xaa at this position is a single (one, 1) amino acid selected from the following options: Ala Gly Glu
  MISC_FEATURE (38)..(38): Xaa at this position is a single (one, 1) amino acid selected from the following options: Gly Ala
  MISC_FEATURE (39)..(39): Xaa at this position is a single (one, 1) amino acid selected from the following options: Gly Pro Ala Val Leu Ile Met Cys Phe Tyr Trp His Lys Arg Gln Asn Glu Asp Ser Thr
  MISC_FEATURE (40)..(40): Xaa at this position is a single (one, 1) amino acid selected from the following options: Ile Val
  MISC_FEATURE (41)..(41): Xaa at this position is a single (one, 1) amino acid selected from the following options: Arg Trp
  MISC_FEATURE (42)..(42): Xaa at this position is a single (one, 1) amino acid selected from the following options: Asp Glu Asn
  MISC_FEATURE (45)..(45): Xaa at this position is a single (one, 1) amino acid selected from the following options: Gly Val
  MISC_FEATURE (46)..(46): Xaa at this position is a single (one, 1) amino acid selected from the following options: Ala Asp
  MISC_FEATURE (48)..(48): Xaa at this position is a single (one, 1) amino acid selected from the following options: Gly Arg
  MISC_FEATURE (50)..(50): Xaa at this position is a single (one, 1) amino acid selected from the following options: Lys Arg
  MISC_FEATURE (51)..(51): Xaa at this position is a single (one, 1) amino acid selected from the following options: Gly Pro Ala Val Leu Ile Met Cys Phe Tyr Trp His Lys Arg Gln Asn Glu Asp Ser Thr
  MISC_FEATURE (52)..(52): Xaa at this position is a single (one, 1) amino acid selected from the following options: Gln Ala
  MISC_FEATURE (54)..(54): Xaa at this position is a single (one, 1) amino acid selected from the following options: Glu His Lys
  MISC_FEATURE (55)..(55): Xaa at this position is a single (one, 1) amino acid selected from the following options: Glu Gly
  MISC_FEATURE (59)..(59): Xaa at this position is a single (one, 1) amino acid selected from the following options: Phe Leu
  MISC_FEATURE (61)..(61): Xaa at this position is a single (one, 1) amino acid selected from the following options: Ala Glu Asp
  MISC_FEATURE (62)..(62): Xaa at this position is a single (one, 1) amino acid selected from the following options: Arg Lys Gln
  MISC_FEATURE (63)..(63): Xaa at this position is a single (one, 1) amino acid selected from the following options: Ala Glu Ser
  MISC_FEATURE (64)..(64): Xaa at this position is a single (one, 1) amino acid selected from the following options: Lys Arg
  MISC_FEATURE (69)..(69): Xaa at this position is a single (one, 1) amino acid selected from the following options: Ala Ser
  MISC_FEATURE (71)..(71): Xaa at this position is a single (one, 1) amino acid selected from the following options: Lys Arg
  MISC_FEATURE (72)..(72): Xaa at this position is a single (one, 1) amino acid selected from the following options: Lys Glu
  MISC_FEATURE (73)..(73): Xaa at this position is a single (one, 1) amino acid selected from the following options: Gly Pro Ala Val Leu Ile Met Cys Phe Tyr Trp His Lys Arg Gln Asn Glu Asp Ser Thr
  MISC_FEATURE (74)..(74): Xaa at this position is a single (one, 1) amino acid selected from the following options: Gly Pro Ala Val Leu Ile Met Cys Phe Tyr Trp His Lys Arg Gln Asn Glu Asp Ser Thr
  MISC_FEATURE (76)..(76): Xaa at this position is a single (one, 1) amino acid selected from the following options: Glu Asn
  MISC_FEATURE (79)..(79): Xaa at this position is a single (one, 1) amino acid selected from the following options: Ser Asp Val
  MISC_FEATURE (80)..(80): Xaa at this position is a single (one, 1) amino acid selected from the following options: Gly Pro Ala Val Leu Ile Met Cys Phe Tyr Trp His Lys Arg Gln Asn Glu Asp Ser Thr
  MISC_FEATURE (81)..(81): Xaa at this position is a single (one, 1) amino acid selected from the following options: Gly Pro Ala Val Leu Ile Met Cys Phe Tyr Trp His Lys Arg Gln Asn Glu Asp Ser Thr
  MISC_FEATURE (82)..(82): Xaa at this position is a single (one, 1) amino acid selected from the following options: Lys Val
  MISC_FEATURE (86)..(86): Xaa at this position is a single (one, 1) amino acid selected from the following options: Glu Gln
  MISC_FEATURE (87)..(87): Xaa at this position is a single (one, 1) amino acid selected from the following options: His Arg
  MISC_FEATURE (93)..(93): Xaa at this position is a single (one, 1) amino acid selected from the following options: Glu Asp
  MISC_FEATURE (97)..(97): Xaa at this position is a single (one, 1) amino acid selected from the following options: Gln Asn
  MISC_FEATURE (98)..(98): Xaa at this position is a single (one, 1) amino acid selected from the following options: Ser Lys
  MISC_FEATURE (101)..(101): Xaa at this position is a single (one, 1) amino acid selected from the following options: Lys Met
  MISC_FEATURE (104)..(104): Xaa at this position is a single (one, 1) amino acid selected from the following options: His Gly
  MISC_FEATURE (107)..(107): Asp or is absent (no amino acid at this position and so this position is not present)
  MISC_FEATURE (108)..(108): Asp or is absent (no amino acid at this position and so this position is not present)
MAXXXXXXXXXXXXXXXXXXXXXXXXXXXXXXXXXXXXXXXXAGXXFXKXXXAXXERYXRXXXXEQLAXLXXXXEXEIXXXXKEIXXLQKEIXRHKXXIKXLKXDDXX

SEQ ID NO: 35 - protein, 108 aa, Artificial Sequence
  Designed; as detailed elsewhere in present application
  MISC_FEATURE (3)..(3): Xaa at this position is a single (one, 1) amino acid selected from the following options: Val Gly Ala Thr
  MISC_FEATURE (4)..(4): Xaa at this position is a single (one, 1) amino acid selected from the following options: Thr Ser Pro
  MISC_FEATURE (5)..(5): Xaa at this position is a single (one, 1) amino acid selected from the following options: Ala Val Glu
  MISC_FEATURE (6)..(6): Xaa at this position is a single (one, 1) amino acid selected from the following options: Leu Thr Gln
  MISC_FEATURE (7)..(7): Xaa at this position is a single (one, 1) amino acid selected from the following options: Ala Val
  MISC_FEATURE (8)..(8): Xaa at this position is a single (one, 1) amino acid selected from the following options: Ala Val Leu Ile Thr
  MISC_FEATURE (9)..(9): Xaa at this position is a single (one, 1) amino acid selected from the following options: Arg Gln Trp
  MISC_FEATURE (10)..(10): Xaa at this position is a single (one, 1) amino acid selected from the following options: Thr Val Met Ala Ser Leu
  MISC_FEATURE (11)..(11): Xaa at this position is a single (one, 1) amino acid selected from the following options: Trp Arg Gln
  MISC_FEATURE (12)..(12): Xaa at this position is a single (one, 1) amino acid selected from the following options: Leu Phe Gln
  MISC_FEATURE (13)..(13): Xaa at this position is a single (one, 1) amino acid selected from the following options: Gly Tyr Cys Ala Arg
  MISC_FEATURE (14)..(14): Xaa at this position is a single (one, 1) amino acid selected from the following options: Val Ser Ala Thr Met Arg
  MISC_FEATURE (15)..(15): Xaa at this position is a single (one, 1) amino acid selected from the following options: Trp Leu
  MISC_FEATURE (16)..(16): Xaa at this position is a single (one, 1) amino acid selected from the following options: Gly Ser
  MISC_FEATURE (17)..(17): Xaa at this position is a single (one, 1) amino acid selected from the following options: Val Ala Met
  MISC_FEATURE (18)..(18): Xaa at this position is a single (one, 1) amino acid selected from the following options: Arg Trp Lys Leu
  MISC_FEATURE (19)..(19): Xaa at this position is a single (one, 1) amino acid selected from the following options: Thr Ala Val Ser
  MISC_FEATURE (20)..(20): Xaa at this position is a single (one, 1) amino acid selected from the following options: Met Leu Ile Arg Val Ala Thr
  MISC_FEATURE (21)..(21): Xaa at this position is a single (one, 1) amino acid selected from the following options: Gln Arg
  MISC_FEATURE (22)..(22): Xaa at this position is a single (one, 1) amino acid selected from the following options: Ala Thr Gly Ser
  MISC_FEATURE (23)..(23): Xaa at this position is a single (one, 1) amino acid selected from the following options: Arg Gln Gly Leu
  MISC_FEATURE (24)..(24): Xaa at this position is a single (one, 1) amino acid selected from the following options: Gly Ser
  MISC_FEATURE (25)..(25): Xaa at this position is a single (one, 1) amino acid selected from the following options: Phe Tyr
  MISC_FEATURE (26)..(26): Xaa at this position is a single (one, 1) amino acid selected from the following options: Gly Leu
  MISC_FEATURE (27)..(27): Xaa at this position is a single (one, 1) amino acid selected from the following options: Ser Gly
  MISC_FEATURE (28)..(28): Xaa at this position is a single (one, 1) amino acid selected from the following options: Glu Asp
  MISC_FEATURE (29)..(29): Xaa at this position is a single (one, 1) amino acid selected from the following options: Gly Ser
  MISC_FEATURE (30)..(30): Xaa at this position is a single (one, 1) amino acid selected from the following options: Ala Ser
  MISC_FEATURE (31)..(31): Xaa at this position is a single (one, 1) amino acid selected from the following options: Asp Gly
  MISC_FEATURE (32)..(32): Xaa at this position is a single (one, 1) amino acid selected from the following options: Asn Lys
  MISC_FEATURE (33)..(33): Xaa at this position is a single (one, 1) amino acid selected from the following options: Leu Gly
  MISC_FEATURE (34)..(34): Xaa at this position is a single (one, 1) amino acid selected from the following options: Gly Asp
  MISC_FEATURE (35)..(35): Xaa at this position is a single (one, 1) amino acid selected from the following options: Ser Gly
  MISC_FEATURE (36)..(36): Xaa at this position is a single (one, 1) amino acid selected from the following options: Ser Gly
  MISC_FEATURE (37)..(37): Xaa at this position is a single (one, 1) amino acid selected from the following options: Ala Gly
  MISC_FEATURE (38)..(38): Xaa at this position is a single (one, 1) amino acid selected from the following options: Gly Ala
  MISC_FEATURE (39)..(39): Xaa at this position is a single (one, 1) amino acid selected from the following options: Gly Pro Ala Val Leu Ile Met Cys Phe Tyr Trp His Lys Arg Gln Asn Glu Asp Ser Thr
  MISC_FEATURE (40)..(40): Xaa at this position is a single (one, 1) amino acid selected from the following options: Ile Val
  MISC_FEATURE (41)..(41): Xaa at this position is a single (one, 1) amino acid selected from the following options: Arg Trp
  MISC_FEATURE (42)..(42): Xaa at this position is a single (one, 1) amino acid selected from the following options: Asp Glu
  MISC_FEATURE (50)..(50): Xaa at this position is a single (one, 1) amino acid selected from the following options: Lys Arg
  MISC_FEATURE (51)..(51): Xaa at this position is a single (one, 1) amino acid selected from the following options: Gly Pro Ala Val Leu Ile Met Cys Phe Tyr Trp His Lys Arg Gln Asn Glu Asp Ser Thr
  MISC_FEATURE (52)..(52): Xaa at this position is a single (one, 1) amino acid selected from the following options: Gln Ala
  MISC_FEATURE (54)..(54): Xaa at this position is a single (one, 1) amino acid selected from the following options: Glu His
  MISC_FEATURE (59)..(59): Xaa at this position is a single (one, 1) amino acid selected from the following options: Phe Leu
  MISC_FEATURE (61)..(61): Xaa at this position is a single (one, 1) amino acid selected from the following options: Ala Glu
  MISC_FEATURE (62)..(62): Xaa at this position is a single (one, 1) amino acid selected from the following options: Arg Lys
  MISC_FEATURE (63)..(63): Xaa at this position is a single (one, 1) amino acid selected from the following options: Ala Glu
  MISC_FEATURE (64)..(64): Xaa at this position is a single (one, 1) amino acid selected from the following options: Lys Arg
  MISC_FEATURE (69)..(69): Xaa at this position is a single (one, 1) amino acid selected from the following options: Ala Ser
  MISC_FEATURE (71)..(71): Xaa at this position is a single (one, 1) amino acid selected from the following options: Lys Arg
  MISC_FEATURE (72)..(72): Xaa at this position is a single (one, 1) amino acid selected from the following options: Lys Glu
  MISC_FEATURE (73)..(73): Xaa at this position is a single (one, 1) amino acid selected from the following options: Gly Pro Ala Val Leu Ile Met Cys Phe Tyr Trp His Lys Arg Gln Asn Glu Asp Ser Thr
  MISC_FEATURE (74)..(74): Xaa at this position is a single (one, 1) amino acid selected from the following options: Gly Pro Ala Val Leu Ile Met Cys Phe Tyr Trp His Lys Arg Gln Asn Glu Asp Ser Thr
  MISC_FEATURE (76)..(76): Xaa at this position is a single (one, 1) amino acid selected from the following options: Glu Asn
  MISC_FEATURE (79)..(79): Xaa at this position is a single (one, 1) amino acid selected from the following options: Ser Asp
  MISC_FEATURE (80)..(80): Xaa at this position is a single (one, 1) amino acid selected from the following options: Gly Pro Ala Val Leu Ile Met Cys Phe Tyr Trp His Lys Arg Gln Asn Glu Asp Ser Thr
  MISC_FEATURE (81)..(81): Xaa at this position is a single (one, 1) amino acid selected from the following options: Gly Pro Ala Val Leu Ile Met Cys Phe Tyr Trp His Lys Arg Gln Asn Glu Asp Ser Thr
  MISC_FEATURE (82)..(82): Xaa at this position is a single (one, 1) amino acid selected from the following options: Lys Val
  MISC_FEATURE (86)..(86): Xaa at this position is a single (one, 1) amino acid selected from the following options: Glu Gln
  MISC_FEATURE (87)..(87): Xaa at this position is a single (one, 1) amino acid selected from the following options: His Arg
  MISC_FEATURE (93)..(93): Xaa at this position is a single (one, 1) amino acid selected from the following options: Glu Asp
  MISC_FEATURE (97)..(97): Xaa at this position is a single (one, 1) amino acid selected from the following options: Gln Asn
  MISC_FEATURE (98)..(98): Xaa at this position is a single (one, 1) amino acid selected from the following options: Ser Lys
  MISC_FEATURE (104)..(104): Xaa at this position is a single (one, 1) amino acid selected from the following options: His Gly
  MISC_FEATURE (108)..(108): Asp or is absent (no amino acid at this position and so this position is not present)
MAXXXXXXXXXXXXXXXXXXXXXXXXXXXXXXXXXXXXXXXXAGGAFGKXXXAXEERYXRXXXXEQLAXLXXXXEXEIXXXXKEIXXLQKEIXRHKXXIKKLKXDDDX

SEQ ID NO: 36 - protein, 108 aa, Artificial Sequence
  Designed; as detailed elsewhere in present application
  MISC_FEATURE (26)..(26): Xaa at this position is a single (one, 1) amino acid selected from the following options: Gly Leu
  MISC_FEATURE (27)..(27): Xaa at this position is a single (one, 1) amino acid selected from the following options: Ser Gly
  MISC_FEATURE (28)..(28): Xaa at this position is a single (one, 1) amino acid selected from the following options: Glu Asp
  MISC_FEATURE (29)..(29): Xaa at this position is a single (one, 1) amino acid selected from the following options: Gly Ser
  MISC_FEATURE (30)..(30): Xaa at this position is a single (one, 1) amino acid selected from the following options: Ala Ser
  MISC_FEATURE (31)..(31): Xaa at this position is a single (one, 1) amino acid selected from the following options: Asp Gly
  MISC_FEATURE (32)..(32): Xaa at this position is a single (one, 1) amino acid selected from the following options: Asn Lys
  MISC_FEATURE (33)..(33): Xaa at this position is a single (one, 1) amino acid selected from the following options: Leu Gly
  MISC_FEATURE (34)..(34): Xaa at this position is a single (one, 1) amino acid selected from the following options: Gly Asp
  MISC_FEATURE (35)..(35): Xaa at this position is a single (one, 1) amino acid selected from the following options: Ser Gly
  MISC_FEATURE (36)..(36): Xaa at this position is a single (one, 1) amino acid selected from the following options: Ser Gly
  MISC_FEATURE (37)..(37): Xaa at this position is a single (one, 1) amino acid selected from the following options: Ala Gly
  MISC_FEATURE (38)..(38): Xaa at this position is a single (one, 1) amino acid selected from the following options: Gly Ala
  MISC_FEATURE (39)..(39): Xaa at this position is a single (one, 1) amino acid selected from the following options: Gly Pro Ala Val Leu Ile Met Cys Phe Tyr Trp His Lys Arg Gln Asn Glu Asp Ser Thr
  MISC_FEATURE (40)..(40): Xaa at this position is a single (one, 1) amino acid selected from the following options: Ile Val
  MISC_FEATURE (41)..(41): Xaa at this position is a single (one, 1) amino acid selected from the following options: Arg Trp
  MISC_FEATURE (42)..(42): Xaa at this position is a single (one, 1) amino acid selected from the following options: Asp Glu
  MISC_FEATURE (50)..(50): Xaa at this position is a single (one, 1) amino acid selected from the following options: Lys Arg
  MISC_FEATURE (51)..(51): Xaa at this position is a single (one, 1) amino acid selected from the following options: Gly Pro Ala Val Leu Ile Met Cys Phe Tyr Trp His Lys Arg Gln Asn Glu Asp Ser Thr
  MISC_FEATURE (52)..(52): Xaa at this position is a single (one, 1) amino acid selected from the following options: Gln Ala
  MISC_FEATURE (54)..(54): Xaa at this position is a single (one, 1) amino acid selected from the following options: Glu His
  MISC_FEATURE (59)..(59): Xaa at this position is a single (one, 1) amino acid selected from the following options: Phe Leu
  MISC_FEATURE (61)..(61): Xaa at this position is a single (one, 1) amino acid selected from the following options: Ala Glu
  MISC_FEATURE (62)..(62): Xaa at this position is a single (one, 1) amino acid selected from the following options: Arg Lys
  MISC_FEATURE (63)..(63): Xaa at this position is a single (one, 1) amino acid selected from the following options: Ala Glu
  MISC_FEATURE (64)..(64): Xaa at this position is a single (one, 1) amino acid selected from the following options: Lys Arg
  MISC_FEATURE (69)..(69): Xaa at this position is a single (one, 1) amino acid selected from the following options: Ala Ser
  MISC_FEATURE (71)..(71): Xaa at this position is a single (one, 1) amino acid selected from the following options: Lys Arg
  MISC_FEATURE (72)..(72): Xaa at this position is a single (one, 1) amino acid selected from the following options: Lys Glu
  MISC_FEATURE (73)..(73): Xaa at this position is a single (one, 1) amino acid selected from the following options: Gly Pro Ala Val Leu Ile Met Cys Phe Tyr Trp His Lys Arg Gln Asn Glu Asp Ser Thr
  MISC_FEATURE (74)..(74): Xaa at this position is a single (one, 1) amino acid selected from the following options: Gly Pro Ala Val Leu Ile Met Cys Phe Tyr Trp His Lys Arg Gln Asn Glu Asp Ser Thr
  MISC_FEATURE (76)..(76): Xaa at this position is a single (one, 1) amino acid selected from the following options: Glu Asn
  MISC_FEATURE (79)..(79): Xaa at this position is a single (one, 1) amino acid selected from the following options: Ser Asp
  MISC_FEATURE (80)..(80): Xaa at this position is a single (one, 1) amino acid selected from the following options: Gly Pro Ala Val Leu Ile Met Cys Phe Tyr Trp His Lys Arg Gln Asn Glu Asp Ser Thr
  MISC_FEATURE (81)..(81): Xaa at this position is a single (one, 1) amino acid selected from the following options: Gly Pro Ala Val Leu Ile Met Cys Phe Tyr Trp His Lys Arg Gln Asn Glu Asp Ser Thr
  MISC_FEATURE (82)..(82): Xaa at this position is a single (one, 1) amino acid selected from the following options: Lys Val
  MISC_FEATURE (86)..(86): Xaa at this position is a single (one, 1) amino acid selected from the following options: Glu Gln
  MISC_FEATURE (87)..(87): Xaa at this position is a single (one, 1) amino acid selected from the following options: His Arg
  MISC_FEATURE (93)..(93): Xaa at this position is a single (one, 1) amino acid selected from the following options: Glu Asp
  MISC_FEATURE (97)..(97): Xaa at this position is a single (one, 1) amino acid selected from the following options: Gln Asn
  MISC_FEATURE (98)..(98): Xaa at this position is a single (one, 1) amino acid selected from the following options: Ser Lys
  MISC_FEATURE (104)..(104): Xaa at this position is a single (one, 1) amino acid selected from the following options: His Gly
  MISC_FEATURE (108)..(108): Asp or is absent (no amino acid at this position and so this position is not present)
MAVTALAARTWLGVWGVRTMQARGFXXXXXXXXXXXXXXXXXAGGAFGKXXXAXEERYXRXXXXEQLAXLXXXXEXEIXXXXKEIXXLQKEIXRHKXXIKKLKXDDDX

SEQ ID NO: 37 - protein, 108 aa, Artificial Sequence
  Designed; as detailed elsewhere in present application
  MISC_FEATURE (26)..(26): Xaa at this position is a single (one, 1) amino acid selected from the following options: Gly Leu
  MISC_FEATURE (27)..(27): Xaa at this position is a single (one, 1) amino acid selected from the following options: Ser Gly
  MISC_FEATURE (28)..(28): Xaa at this position is a single (one, 1) amino acid selected from the following options: Glu Asp
  MISC_FEATURE (29)..(29): Xaa at this position is a single (one, 1) amino acid selected from the following options: Gly Ser
  MISC_FEATURE (30)..(30): Xaa at this position is a single (one, 1) amino acid selected from the following options: Ala Ser
  MISC_FEATURE (31)..(31): Xaa at this position is a single (one, 1) amino acid selected from the following options: Asp Gly
  MISC_FEATURE (32)..(32): Xaa at this position is a single (one, 1) amino acid selected from the following options: Asn Lys
  MISC_FEATURE (33)..(33): Xaa at this position is a single (one, 1) amino acid selected from the following options: Leu Gly
  MISC_FEATURE (34)..(34): Xaa at this position is a single (one, 1) amino acid selected from the following options: Gly Asp
  MISC_FEATURE (35)..(35): Xaa at this position is a single (one, 1) amino acid selected from the following options: Ser Gly
  MISC_FEATURE (36)..(36): Xaa at this position is a single (one, 1) amino acid selected from the following options: Ser Gly
  MISC_FEATURE (37)..(37): Xaa at this position is a single (one, 1) amino acid selected from the following options: Ala Gly
  MISC_FEATURE (38)..(38): Xaa at this position is a single (one, 1) amino acid selected from the following options: Gly Ala
  MISC_FEATURE (39)..(39): Xaa at this position is a single (one, 1) amino acid selected from the following options: Gly Pro Ala Val Leu Ile Met Cys Phe Tyr Trp His Lys Arg Gln Asn Glu Asp Ser Thr
  MISC_FEATURE (40)..(40): Xaa at this position is a single (one, 1) amino acid selected from the following options: Ile Val
  MISC_FEATURE (41)..(41): Xaa at this position is a single (one, 1) amino acid selected from the following options: Arg Trp
  MISC_FEATURE (42)..(42): Xaa at this position is a single (one, 1) amino acid selected from the following options: Asp Glu
  MISC_FEATURE (50)..(50): Xaa at this position is a single (one, 1) amino acid selected from the following options: Lys Arg
  MISC_FEATURE (51)..(51): Xaa at this position is a single (one, 1) amino acid selected from the following options: Gly Pro Ala Val Leu Ile Met Cys Phe Tyr Trp His Lys Arg Gln Asn Glu Asp Ser Thr
  MISC_FEATURE (52)..(52): Xaa at this position is a single (one, 1) amino acid selected from the following options: Gln Ala
  MISC_FEATURE (54)..(54): Xaa at this position is a single (one, 1) amino acid selected from the following options: Glu His
  MISC_FEATURE (59)..(59): Xaa at this position is a single (one, 1) amino acid selected from the following options: Phe Leu
  MISC_FEATURE (61)..(61): Xaa at this position is a single (one, 1) amino acid selected from the following options: Ala Glu
  MISC_FEATURE (62)..(62): Xaa at this position is a single (one, 1) amino acid selected from the following options: Arg Lys
  MISC_FEATURE (63)..(63): Xaa at this position is a single (one, 1) amino acid selected from the following options: Ala Glu
  MISC_FEATURE (64)..(64): Xaa at this position is a single (one, 1) amino acid selected from the following options: Lys Arg
  MISC_FEATURE (69)..(69): Xaa at this position is a single (one, 1) amino acid selected from the following options: Ala Ser
  MISC_FEATURE (71)..(71): Xaa at this position is a single (one, 1) amino acid selected from the following options: Lys Arg
  MISC_FEATURE (72)..(72): Xaa at this position is a single (one, 1) amino acid selected from the following options: Lys Glu
  MISC_FEATURE (73)..(73): Xaa at this position is a single (one, 1) amino acid selected from the following options: Gly Pro Ala Val Leu Ile Met Cys Phe Tyr Trp His Lys Arg Gln Asn Glu Asp Ser Thr
  MISC_FEATURE (74)..(74): Xaa at this position is a single (one, 1) amino acid selected from the following options: Gly Pro Ala Val Leu Ile Met Cys Phe Tyr Trp His Lys Arg Gln Asn Glu Asp Ser Thr
  MISC_FEATURE (76)..(76): Xaa at this position is a single (one, 1) amino acid selected from the following options: Glu Asn
  MISC_FEATURE (79)..(79): Xaa at this position is a single (one, 1) amino acid selected from the following options: Ser Asp
  MISC_FEATURE (80)..(80): Xaa at this position is a single (one, 1) amino acid selected from the following options: Gly Pro Ala Val Leu Ile Met Cys Phe Tyr Trp His Lys Arg Gln Asn Glu Asp Ser Thr
  MISC_FEATURE (81)..(81): Xaa at this position is a single (one, 1) amino acid selected from the following options: Gly Pro Ala Val Leu Ile Met Cys Phe Tyr Trp His Lys Arg Gln Asn Glu Asp Ser Thr
  MISC_FEATURE (82)..(82): Xaa at this position is a single (one, 1) amino acid selected from the following options: Lys Val
  MISC_FEATURE (86)..(86): Xaa at this position is a single (one, 1) amino acid selected from the following options: Glu Gln
  MISC_FEATURE (87)..(87): Xaa at this position is a single (one, 1) amino acid selected from the following options: His Arg
  MISC_FEATURE (93)..(93): Xaa at this position is a single (one, 1) amino acid selected from the following options: Glu Asp
  MISC_FEATURE (97)..(97): Xaa at this position is a single (one, 1) amino acid selected from the following options: Gln Asn
  MISC_FEATURE (98)..(98): Xaa at this position is a single (one, 1) amino acid selected from the following options: Ser Lys
  MISC_FEATURE (104)..(104): Xaa at this position is a single (one, 1) amino acid selected from the following options: His Gly
  MISC_FEATURE (108)..(108): Asp or is absent (no amino acid at this position and so this position is not present)
MAGSALAVRARFGVWGMKVLQTRGFXXXXXXXXXXXXXXXXXAGGAFGKXXXAXEERYXRXXXXEQLAXLXXXXEXEIXXXXKEIXXLQKEIXRHKXXIKKLKXDDDX

SEQ ID NO: 38 - protein, 115 aa, Artificial Sequence
  Designed; as detailed elsewhere in present application
  MISC_FEATURE (3)..(3): Xaa at this position is a single (one, 1) amino acid selected from the following options: Val Gly Ala Thr
  MISC_FEATURE (4)..(4): Xaa at this position is a single (one, 1) amino acid selected from the following options: Thr Ser Pro
  MISC_FEATURE (5)..(5): Xaa at this position is a single (one, 1) amino acid selected from the following options: Glu Ala Val
  MISC_FEATURE (6)..(6): Xaa at this position is a single (one, 1) amino acid selected from the following options: Leu Thr Gln
  MISC_FEATURE (7)..(7): Xaa at this position is a single (one, 1) amino acid selected from the following options: Ala Val
  MISC_FEATURE (8)..(8): Xaa at this position is a single (one, 1) amino acid selected from the following options: Ala Val Leu Ile Thr
  MISC_FEATURE (9)..(9): Xaa at this position is a single (one, 1) amino acid selected from the following options: Trp Arg Gln
  MISC_FEATURE (10)..(10): Xaa at this position is a single (one, 1) amino acid selected from the following options: Thr Val Met Ala Ser Leu
  MISC_FEATURE (11)..(11): Xaa at this position is a single (one, 1) amino acid selected from the following options: Gln Trp Arg
  MISC_FEATURE (12)..(12): Xaa at this position is a single (one, 1) amino acid selected from the following options: Leu Phe Gln
  MISC_FEATURE (13)..(13): Xaa at this position is a single (one, 1) amino acid selected from the following options: Arg Gly Tyr Cys Ala
  MISC_FEATURE (14)..(14): Xaa at this position is a single (one, 1) amino acid selected from the following options: Val Ser Ala Thr Met Arg
  MISC_FEATURE (15)..(15): Xaa at this position is a single (one, 1) amino acid selected from the following options: Trp Leu
  MISC_FEATURE (16)..(16): Xaa at this position is a single (one, 1) amino acid selected from the following options: Gly Ser
  MISC_FEATURE (17)..(17): Xaa at this position is a single (one, 1) amino acid selected from the following options: Val Ala Met
  MISC_FEATURE (18)..(18): Xaa at this position is a single (one, 1) amino acid selected from the following options: Arg Trp Lys Leu
  MISC_FEATURE (19)..(19): Xaa at this position is a single (one, 1) amino acid selected from the following options: Thr Ala Val Ser
  MISC_FEATURE (20)..(20): Xaa at this position is a single (one, 1) amino acid selected from the following options: Met Leu Ile Arg Val Ala Thr
  MISC_FEATURE (21)..(21): Xaa at this position is a single (one, 1) amino acid selected from the following options: Gln Arg
  MISC_FEATURE (22)..(22): Xaa at this position is a single (one, 1) amino acid selected from the following options: Ala Thr Gly Ser
  MISC_FEATURE (23)..(23): Xaa at this position is a single (one, 1) amino acid selected from the following options: Leu Arg Gln Gly
  MISC_FEATURE (24)..(24): Xaa at this position is a single (one, 1) amino acid selected from the following options: Gly Ser
  MISC_FEATURE (25)..(25): Xaa at this position is a single (one, 1) amino acid selected from the following options: Phe Tyr
  MISC_FEATURE (26)..(26): Xaa at this position is a single (one, 1) amino acid selected from the following options: Gly Ser Val Ala Thr Leu Arg Phe Ile Lys Met Gln Asn
  MISC_FEATURE (27)..(27): Xaa at this position is a single (one, 1) amino acid selected from the following options: Ser Cys Arg Gly Phe Thr Pro
  MISC_FEATURE (28)..(28): Xaa at this position is a single (one, 1) amino acid selected from the following options: Asp Glu Gly Ser Phe Lys Thr Leu Phe Pro
  MISC_FEATURE (29)..(29): Xaa at this position is a single (one, 1) amino acid selected from the following options: Pro Gln Arg Ser Thr Lys Gly Glu Ala Phe
  MISC_FEATURE (30)..(30): Xaa at this position is a single (one, 1) amino acid selected from the following options: Ser Pro Ala Gly Arg Glu Asp Val
  MISC_FEATURE (31)..(31): Xaa at this position is a single (one, 1) amino acid selected from the following options: Glu Asp Lys His Ala Gly Asn Ser Arg Gln Asp Thr Leu Val
  MISC_FEATURE (32)..(32): Xaa at this position is a single (one, 1) amino acid selected from the following options: Asn Asp Tyr Ser Gly Arg His Lys Glu Ala Leu
  MISC_FEATURE (33)..(33): Xaa at this position is a single (one, 1) amino acid selected from the following options: Val Leu Pro His Met Ile Phe Thr Gly Gly Ser Asp Glu Phe
  MISC_FEATURE (34)..(34): Xaa at this position is a single (one, 1) amino acid selected from the following options: Asp Gly His Arg Ser Glu Pro
  MISC_FEATURE (35)..(35): Xaa at this position is a single (one, 1) amino acid selected from the following options: Arg Ser Gly Thr Pro Ala Lys Glu
  MISC_FEATURE (36)..(36): Xaa at this position is a single (one, 1) amino acid selected from the following options: Arg Thr Gly Ser Arg Pro Lys Asp Ala
  MISC_FEATURE (37)..(37): Xaa at this position is a single (one, 1) amino acid selected from the following options: Ala Glu Ser Gly Arg
  MISC_FEATURE (38)..(38): Xaa at this position is a single (one, 1) amino acid selected from the following options: Ala Gly Gln Pro
  MISC_FEATURE (39)..(39): Xaa at this position is a single (one, 1) amino acid selected from the following options: Gly Pro Ala Val Leu Ile Met Cys Phe Tyr Trp His Lys Arg Gln Asn Glu Asp Ser Thr
  MISC_FEATURE (40)..(40): Xaa at this position is a single (one, 1) amino acid selected from the following options: Ile Val Leu Glu Phe
  MISC_FEATURE (41)..(41): Xaa at this position is a single (one, 1) amino acid selected from the following options: Trp Arg Lys Glu Thr Tyr
  MISC_FEATURE (42)..(42): Xaa at this position is a single (one, 1) amino acid selected from the following options: Asn Glu Asp Ala Lys Ser
  MISC_FEATURE (43)..(43): Xaa at this position is a single (one, 1) amino acid selected from the following options: Ala Arg Lys Cys
  MISC_FEATURE (44)..(44): Xaa at this position is a single (one, 1) amino acid selected from the following options: Gly Tyr Glu Pro
  MISC_FEATURE (45)..(45): Xaa at this position is a single (one, 1) amino acid selected from the following options: Val Gly Phe Lys Arg
  MISC_FEATURE (46)..(46): Xaa at this position is a single (one, 1) amino acid selected from the following options: Asp Ala Ser Arg Leu
  MISC_FEATURE (47)..(47): Xaa at this position is a single (one, 1) amino acid selected from the following options: Phe Leu Ile Glu Ser
  MISC_FEATURE (48)..(48): Xaa at this position is a single (one, 1) amino acid selected from the following options: Arg Gly Ala Ile Glu Ser Pro
  MISC_FEATURE (49)..(49): Xaa at this position is a single (one, 1) amino acid selected from the following options: Lys Arg Thr Glu Gln
  MISC_FEATURE (50)..(50): Xaa at this position is a single (one, 1) amino acid selected from the following options: Arg Lys Met
  MISC_FEATURE (51)..(51): Xaa at this position is a single (one, 1) amino acid selected from the following options: Gly Pro Ala Val Leu Ile Met Cys Phe Tyr Trp His Lys Arg Gln Asn Glu Asp Ser Thr
  MISC_FEATURE (52)..(52): Xaa at this position is a single (one, 1) amino acid selected from the following options: Gln Ala Lys Arg Pro Phe Val
  MISC_FEATURE (53)..(53): Xaa at this position is a single (one, 1) amino acid selected from the following options: Ala Ser Arg
  MISC_FEATURE (54)..(54): Xaa at this position is a single (one, 1) amino acid selected from the following options: Lys Glu Asp His Ala Ile
  MISC_FEATURE (55)..(55): Xaa at this position is a single (one, 1) amino acid selected from the following options: Gly Glu Pro Arg
  MISC_FEATURE (56)..(56): Xaa at this position is a single (one, 1) amino acid selected from the following options: Glu Asp Tyr Thr Gln
  MISC_FEATURE (57)..(57): Xaa at this position is a single (one, 1) amino acid selected from the following options: Arg Met Lys
  MISC_FEATURE (58)..(58): Xaa at this position is a single (one, 1) amino acid selected from the following options: Tyr Phe Glu
  MISC_FEATURE (59)..(59): Xaa at this position is a single (one, 1) amino acid selected from the following options: Leu Phe Pro Gln
  MISC_FEATURE (60)..(60): Xaa at this position is a single (one, 1) amino acid selected from the following options: Arg Leu Lys
  MISC_FEATURE (61)..(61): Xaa at this position is a single (one, 1) amino acid selected from the following options: Ala Lys Glu Thr Asp Gln Arg
  MISC_FEATURE (62)..(62): Xaa at this position is a single (one, 1) amino acid selected from the following options: Gln Arg Lys Ala Cys
  MISC_FEATURE (63)..(63): Xaa at this position is a single (one, 1) amino acid selected from the following options: Ser Thr Ala Asn Glu Leu
  MISC_FEATURE (64)..(64): Xaa at this position is a single (one, 1) amino acid selected from the following options: Arg Lys Gln His Ala
  MISC_FEATURE (65)..(65): Xaa at this position is a single (one, 1) amino acid selected from the following options: Glu Gln Lys
  MISC_FEATURE (66)..(66): Xaa at this position is a single (one, 1) amino acid selected from the following options: Gln Lys
  MISC_FEATURE (67)..(67): Xaa at this position is a single (one, 1) amino acid selected from the following options: Leu His Met Glu
  MISC_FEATURE (68)..(68): Xaa at this position is a single (one, 1) amino acid selected from the following options: Ala Leu Glu Thr Asp Ser
  MISC_FEATURE (69)..(69): Xaa at this position is a single (one, 1) amino acid selected from the following options: Ala Thr Arg Ile Ser Asn Val Met Asp
  MISC_FEATURE (70)..(70): Xaa at this position is a single (one, 1) amino acid selected from the following options: Leu Glu
  MISC_FEATURE (71)..(71): Xaa at this position is a single (one, 1) amino acid selected from the following options: Lys Arg Ile
  MISC_FEATURE (72)..(72): Xaa at this position is a single (one, 1) amino acid selected from the following options: Lys Asn Arg Thr Glu
  MISC_FEATURE (73)..(73): Xaa at this position is a single (one, 1) amino acid selected from the following options: Gly Pro Ala Val Leu Ile Met Cys Phe Tyr Trp His Lys Arg Gln Asn Glu Asp Ser Thr
  MISC_FEATURE (74)..(74): Xaa at this position is a single (one, 1) amino acid selected from the following options: Gly Pro Ala Val Leu Ile Met Cys Phe Tyr Trp His Lys Arg Gln Asn Glu Asp Ser Thr
  MISC_FEATURE (75)..(75): Xaa at this position is a single (one, 1) amino acid selected from the following options: Glu Gln Lys Val
  MISC_FEATURE (76)..(76): Xaa at this position is a single (one, 1) amino acid selected from the following options: Glu Asp Asn Lys
  MISC_FEATURE (77)..(77): Xaa at this position is a single (one, 1) amino acid selected from the following options: Glu Val
  MISC_FEATURE (78)..(78): Xaa at this position is a single (one, 1) amino acid selected from the following options: Ile Val
  MISC_FEATURE (79)..(79): Xaa at this position is a single (one, 1) amino acid selected from the following options: Val Thr Ser Asp Asn Gly Ala Glu Gln Tyr Arg
  MISC_FEATURE (80)..(80): Xaa at this position is a single (one, 1) amino acid selected from the following options: Gly Pro Ala Val Leu Ile Met Cys Phe Tyr Trp His Lys Arg Gln Asn Glu Asp Ser Thr
  MISC_FEATURE (81)..(81): Xaa at this position is a single (one, 1) amino acid selected from the following options: Gly Pro Ala Val Leu Ile Met Cys Phe Tyr Trp His Lys Arg Gln Asn Glu Asp Ser Thr
  MISC_FEATURE (82)..(82): Xaa at this position is a single (one, 1) amino acid selected from the following options: Lys Ser Met Val His Ala Arg Gln Glu Ile Leu Val
  MISC_FEATURE (83)..(83): Xaa at this position is a single (one, 1) amino acid selected from the following options: Lys Glu Gln Arg Gly
  MISC_FEATURE (84)..(84): Xaa at this position is a single (one, 1) amino acid selected from the following options: Glu Ala Gln
  MISC_FEATURE (86)..(86): Xaa at this position is a single (one, 1) amino acid selected from the following options: Glu Lys Asp Gln
  MISC_FEATURE (87)..(87): Xaa at this position is a single (one, 1) amino acid selected from the following options: Arg His Leu Gln Cys Val Gln
  MISC_FEATURE (88)..(88): Xaa at this position is a single (one, 1) amino acid selected from the following options: Leu Met
  MISC_FEATURE (89)..(89): Xaa at this position is a single (one, 1) amino acid selected from the following options: Gln Glu Lys
  MISC_FEATURE (90)..(90): Xaa at this position is a single (one, 1) amino acid selected from the following options: Lys Asn Arg Gln
  MISC_FEATURE (91)..(91): Xaa at this position is a single (one, 1) amino acid selected from the following options: Glu Gln Asn
  MISC_FEATURE (92)..(92): Xaa at this position is a single (one, 1) amino acid selected from the following options: Ile Met
  MISC_FEATURE (93)..(93): Xaa at this position is a single (one, 1) amino acid selected from the following options: Glu Gln Asp Ile Lys
  MISC_FEATURE (94)..(94): Xaa at this position is a single (one, 1) amino acid selected from the following options: Arg Gln Lys Glu
  MISC_FEATURE (95)..(95): Xaa at this position is a single (one, 1) amino acid selected from the following options: His Leu Ile
  MISC_FEATURE (96)..(96): Xaa at this position is a single (one, 1) amino acid selected from the following options: Lys Gln Glu
  MISC_FEATURE (97)..(97): Xaa at this position is a single (one, 1) amino acid selected from the following options: Gln Lys Glu Tyr Gly Ser His Asp Asn
  MISC_FEATURE (98)..(98): Xaa at this position is a single (one, 1) amino acid selected from the following options: Lys Arg Ser Ala Asn Thr His Ser Leu
  MISC_FEATURE (99)..(99): Xaa at this position is a single (one, 1) amino acid selected from the following options: Ile Met Asp Val
  MISC_FEATURE (100)..(100): Xaa at this position is a single (one, 1) amino acid selected from the following options: Lys Gln Arg Asn
  MISC_FEATURE (101)..(101): Xaa at this position is a single (one, 1) amino acid selected from the following options: Met Thr Lys His Tyr Ser Gln Ile Val Asn Asp Arg
  MISC_FEATURE (103)..(103): Xaa at this position is a single (one, 1) amino acid selected from the following options: Lys Asn Ser His Arg Thr Gly
  MISC_FEATURE (104)..(104): Xaa at this position is a single (one, 1) amino acid selected from the following options: His Asp Asn Ser Arg Gln Glu Tyr Asn Leu Gln Gly
  MISC_FEATURE (105)..(105): Xaa at this position is a single (one, 1) amino acid selected from the following options: Asp His Ser Asn Ile or is absent (no amino acid at this position and so this position is not present)
  MISC_FEATURE (106)..(106): Xaa at this position is a single (one, 1) amino acid selected from the following options: Asp Glu His Gly Asn or is absent (no amino acid at this position and so this position is not present)
  MISC_FEATURE (107)..(107): Xaa at this position is a single (one, 1) amino acid selected from the following options: Asp His or is absent (no amino acid at this position and so this position is not present)
  MISC_FEATURE (108)..(108): Xaa at this position is a single (one, 1) amino acid selected from the following options: Asp Glu or is absent (no amino acid at this position and so this position is not present)
  MISC_FEATURE (109)..(109): Asp or is absent (no amino acid at this position and so this position is not present)
  MISC_FEATURE (110)..(110): Asp or is absent (no amino acid at this position and so this position is not present)
  MISC_FEATURE (111)..(111): Asp or is absent (no amino acid at this position and so this position is not present)
  MISC_FEATURE (112)..(112): Asp or is absent (no amino acid at this position and so this position is not present)
  MISC_FEATURE (113)..(113): Asp or is absent (no amino acid at this position and so this position is not present)
  MISC_FEATURE (114)..(114): Asp or is absent (no amino acid at this position and so this position is not present)
  MISC_FEATURE (115)..(115): Asp or is absent (no amino acid at this position and so this position is not present)
MAXXXXXXXXXXXXXXXXXXXXXXXXXXXXXXXXXXXXXXXXXXXXXXXXXXXXXXXXXXXXXXXXXXXXXXXXXXXXXXXXXXIXXXXXXXXXXXXXXXXLXXXXXXXXXXXXX

SEQ ID NO: 39 - protein, 109 aa, Artificial Sequence; identical to SEQ ID NO: 22
  Designed; as detailed elsewhere in present application
  MISC_FEATURE (3)..(3): Xaa at this position is a single (one, 1) amino acid selected from the following options: Val Gly Ala Thr
  MISC_FEATURE (4)..(4): Xaa at this position is a single (one, 1) amino acid selected from the following options: Thr Ser Pro
  MISC_FEATURE (5)..(5): Xaa at this position is a single (one, 1) amino acid selected from the following options: Ala Val Glu
  MISC_FEATURE (6)..(6): Xaa at this position is a single (one, 1) amino acid selected from the following options: Leu Thr Gln
  MISC_FEATURE (7)..(7): Xaa at this position is a single (one, 1) amino acid selected from the following options: Ala Val
  MISC_FEATURE (8)..(8): Xaa at this position is a single (one, 1) amino acid selected from the following options: Ala Val Leu Ile Thr
  MISC_FEATURE (9)..(9): Xaa at this position is a single (one, 1) amino acid selected from the following options: Arg Gln Trp
  MISC_FEATURE (10)..(10): Xaa at this position is a single (one, 1) amino acid selected from the following options: Thr Val Met Ala Ser Leu
  MISC_FEATURE (11)..(11): Xaa at this position is a single (one, 1) amino acid selected from the following options: Trp Arg Gln
  MISC_FEATURE (12)..(12): Xaa at this position is a single (one, 1) amino acid selected from the following options: Leu Phe Gln
  MISC_FEATURE (13)..(13): Xaa at this position is a single (one, 1) amino acid selected from the following options: Gly Tyr Cys Ala Arg
  MISC_FEATURE (14)..(14): Xaa at this position is a single (one, 1) amino acid selected from the following options: Val Ser Ala Thr Met Arg
  MISC_FEATURE (15)..(15): Xaa at this position is a single (one, 1) amino acid selected from the following options: Trp Leu
  MISC_FEATURE (16)..(16): Xaa at this position is a single (one, 1) amino acid selected from the following options: Gly Ser
  MISC_FEATURE (17)..(17): Xaa at this position is a single (one, 1) amino acid selected from the following options: Val Ala Met
  MISC_FEATURE (18)..(18): Xaa at this position is a single (one, 1) amino acid selected from the following options: Arg Trp Lys Leu
  MISC_FEATURE (19)..(19): Xaa at this position is a single (one, 1) amino acid selected from the following options: Thr Ala Val Ser
  MISC_FEATURE (20)..(20): Xaa at this position is a single (one, 1) amino acid selected from the following options: Met Leu Ile Arg Val Ala Thr
  MISC_FEATURE (21)..(21): Xaa at this position is a single (one, 1) amino acid selected from the following options: Gln Arg
  MISC_FEATURE (22)..(22): Xaa at this position is a single (one, 1) amino acid selected from the following options: Ala Thr Gly Ser
  MISC_FEATURE (23)..(23): Xaa at this position is a single (one, 1) amino acid selected from the following options: Arg Gln Gly Leu
  MISC_FEATURE (24)..(24): Xaa at this position is a single (one, 1) amino acid selected from the following options: Gly Ser
  MISC_FEATURE (25)..(25): Xaa at this position is a single (one, 1) amino acid selected from the following options: Phe Tyr
  MISC_FEATURE (26)..(26): Xaa at this position is a single (one, 1) amino acid selected from the following options: Gly Ser Val Ala Thr
  MISC_FEATURE (27)..(27): Xaa at this position is a single (one, 1) amino acid selected from the following options: Ser Cys Arg
  MISC_FEATURE (28)..(28): Xaa at this position is a single (one, 1) amino acid selected from the following options: Asp Glu Gly Ser
  MISC_FEATURE (29)..(29): Xaa at this position is a single (one, 1) amino acid selected from the following options: Gln Arg Ser Thr Lys Pro
  MISC_FEATURE (30)..(30): Xaa at this position is a single (one, 1) amino acid selected from the following options: Ser Pro Ala Gly
  MISC_FEATURE (31)..(31): Xaa at this position is a single (one, 1) amino acid selected from the following options: Glu Asp Lys His Ala Gly Asn
  MISC_FEATURE (32)..(32): Xaa at this position is a single (one, 1) amino acid selected from the following options: Asn Asp Tyr Ser Gly Arg His
  MISC_FEATURE (33)..(33): Xaa at this position is a single (one, 1) amino acid selected from the following options: Val Leu Pro His Met Ile Phe Thr Gly
  MISC_FEATURE (34)..(34): Xaa at this position is a single (one, 1) amino acid selected from the following options: Asp Gly His Arg Ser Glu
  MISC_FEATURE (35)..(35): Xaa at this position is a single (one, 1) amino acid selected from the following options: Arg Ser Gly Thr Pro Ala
  MISC_FEATURE (36)..(36): Xaa at this position is a single (one, 1) amino acid selected from the following options: Gly Ser Arg Pro Lys Asp Arg Thr
  MISC_FEATURE (37)..(37): Xaa at this position is a single (one, 1) amino acid selected from the following options: Ala Glu Ser Glu
  MISC_FEATURE (38)..(38): Xaa at this position is a single (one, 1) amino acid selected from the following options: Gly Ala
  MISC_FEATURE (39)..(39): Xaa at this position is a single (one, 1) amino acid selected from the following options: Ser Thr Ala
  MISC_FEATURE (40)..(40): Xaa at this position is a single (one, 1) amino acid selected from the following options: Ile Val
  MISC_FEATURE (41)..(41): Xaa at this position is a single (one, 1) amino acid selected from the following options: Arg Lys Trp
  MISC_FEATURE (42)..(42): Xaa at this position is a single (one, 1) amino acid selected from the following options: Glu Asp Asn
  MISC_FEATURE (45)..(45): Xaa at this position is a single (one, 1) amino acid selected from the following options: Gly Val
  MISC_FEATURE (46)..(46): Xaa at this position is a single (one, 1) amino acid selected from the following options: Ala Ser Asp
  MISC_FEATURE (48)..(48): Xaa at this position is a single (one, 1) amino acid selected from the following options: Gly Ala Arg
  MISC_FEATURE (49)..(49): Xaa at this position is a single (one, 1) amino acid selected from the following options: Lys Arg
  MISC_FEATURE (50)..(50): Xaa at this position is a single (one, 1) amino acid selected from the following options: Arg Lys
  MISC_FEATURE (51)..(51): Xaa at this position is a single (one, 1) amino acid selected from the following options: Glu Gln Ala
  MISC_FEATURE (52)..(52): Xaa at this position is a single (one, 1) amino acid selected from the following options: Gln Ala Lys Arg
  MISC_FEATURE (53)..(53): Xaa at this position is a single (one, 1) amino acid selected from the following options: Ala Ser
  MISC_FEATURE (54)..(54): Xaa at this position is a single (one, 1) amino acid selected from the following options: Glu Asp Lys
  MISC_FEATURE (55)..(55): Xaa at this position is a single (one, 1) amino acid selected from the following options: Glu Gly
  MISC_FEATURE (56)..(56): Xaa at this position is a single (one, 1) amino acid selected from the following options: Glu Asp
  MISC_FEATURE (59)..(59): Xaa at this position is a single (one, 1) amino acid selected from the following options: Phe Leu
  MISC_FEATURE (60)..(60): Xaa at this position is a single (one, 1) amino acid selected from the following options: Arg Leu
  MISC_FEATURE (61)..(61): Xaa at this position is a single (one, 1) amino acid selected from the following options: Ala Lys Glu Thr
  MISC_FEATURE (62)..(62): Xaa at this position is a single (one, 1) amino acid selected from the following options: Gln Arg Lys
  MISC_FEATURE (63)..(63): Xaa at this position is a single (one, 1) amino acid selected from the following options: Ser Thr Ala Asn
  MISC_FEATURE (64)..(64): Xaa at this position is a single (one, 1) amino acid selected from the following options: Arg Lys
  MISC_FEATURE (65)..(65): Xaa at this position is a single (one, 1) amino acid selected from the following options: Glu Gln
  MISC_FEATURE (68)..(68): Xaa at this position is a single (one, 1) amino acid selected from the following options: Ala Leu Glu Thr
  MISC_FEATURE (69)..(69): Xaa at this position is a single (one, 1) amino acid selected from the following options: Ala Thr Arg Ile
  MISC_FEATURE (71)..(71): Xaa at this position is a single (one, 1) amino acid selected from the following options: Lys Arg
  MISC_FEATURE (73)..(73): Xaa at this position is a single (one, 1) amino acid selected from the following options: His Tyr Ala
  MISC_FEATURE (74)..(74): Xaa at this position is a single (one, 1) amino acid selected from the following options: His Lys Ala
  MISC_FEATURE (76)..(76): Xaa at this position is a single (one, 1) amino acid selected from the following options: Glu Asp Asn
  MISC_FEATURE (78)..(78): Xaa at this position is a single (one, 1) amino acid selected from the following options: Ile Val
  MISC_FEATURE (79)..(79): Xaa at this position is a single (one, 1) amino acid selected from the following options: Val Thr Ser Asp Asn Gly Ala Glu Gln
  MISC_FEATURE (80)..(80): Xaa at this position is a single (one, 1) amino acid selected from the following options: His Ala
  MISC_FEATURE (81)..(81): Xaa at this position is a single (one, 1) amino acid selected from the following options: His Ala
  MISC_FEATURE (82)..(82): Xaa at this position is a single (one, 1) amino acid selected from the following options: Lys Ser Met Val His Ala Arg Gln Glu
  MISC_FEATURE (83)..(83): Xaa at this position is a single (one, 1) amino acid selected from the following options: Lys Glu Gln Arg
  MISC_FEATURE (86)..(86): Xaa at this position is a single (one, 1) amino acid selected from the following options: Glu Lys
  MISC_FEATURE (87)..(87): Xaa at this position is a single (one, 1) amino acid selected from the following options: Arg His
  MISC_FEATURE (90)..(90): Xaa at this position is a single (one, 1) amino acid selected from the following options: Lys Asn
  MISC_FEATURE (91)..(91): Xaa at this position is a single (one, 1) amino acid selected from the following options: Glu Gln
  MISC_FEATURE (93)..(93): Xaa at this position is a single (one, 1) amino acid selected from the following options: Glu Gln
  MISC_FEATURE (94)..(94): Xaa at this position is a single (one, 1) amino acid selected from the following options: Arg Gln
  MISC_FEATURE (96)..(96): Xaa at this position is a single (one, 1) amino acid selected from the following options: Lys Gln
  MISC_FEATURE (97)..(97): Xaa at this position is a single (one, 1) amino acid selected from the following options: Gln Lys Glu
  MISC_FEATURE (98)..(98): Xaa at this position is a single (one, 1) amino acid selected from the following options: Lys Arg Ser Ala Asn Thr
  MISC_FEATURE (99)..(99): Xaa at this position is a single (one, 1) amino acid selected from the following options: Ile Met
  MISC_FEATURE (100)..(100): Xaa at this position is a single (one, 1) amino acid selected from the following options: Lys Gln
  MISC_FEATURE (101)..(101): Xaa at this position is a single (one, 1) amino acid selected from the following options: Met Thr Lys His Tyr Ser Gln Ile Val Asn
  MISC_FEATURE (103)..(103): Xaa at this position is a single (one, 1) amino acid selected from the following options: Lys Asn Ser His
  MISC_FEATURE (104)..(104): Xaa at this position is a single (one, 1) amino acid selected from the following options: His Asp Asn Ser Arg Gln Glu Tyr
  MISC_FEATURE (105)..(105): Xaa at this position is a single (one, 1) amino acid selected from the following options: Asp His Ser Asn Ile
  MISC_FEATURE (106)..(106): Xaa at this position is a single (one, 1) amino acid selected from the following options: Asp Glu His Gly or is absent (no amino acid at this position and so this position is not present)
  MISC_FEATURE (107)..(107): Xaa at this position is a single (one, 1) amino acid selected from the following options: Asp His or is absent (no amino acid at this position and so this position is not present)
  MISC_FEATURE (108)..(108): Xaa at this position is a single (one, 1) amino acid selected from the following options: Asp or is absent (no amino acid at this position and so this position is not present)
  MISC_FEATURE (109)..(109): Xaa at this position is a single (one, 1) amino acid selected from the following options: Asp or is absent (no amino acid at this position and so this position is not present)

SEQ ID NO: 40 - protein, 109 aa, Artificial Sequence; identical to SEQ ID NO: 23
  Designed; as detailed elsewhere in present application
  MISC_FEATURE (3)..(3): Xaa at this position is a single (one, 1) amino acid selected from the following options: Val Ala
  MISC_FEATURE (7)..(7): Xaa at this position is a single (one, 1) amino acid selected from the following options: Ala Val
  MISC_FEATURE (11)..(11): Xaa at this position is a single (one, 1) amino acid selected from the following options: Trp Arg
  MISC_FEATURE (12)..(12): Xaa at this position is a single (one, 1) amino acid selected from the following options: Leu Phe
  MISC_FEATURE (16)..(16): Xaa at this position is a single (one, 1) amino acid selected from the following options: Gly Ser
  MISC_FEATURE (18)..(18): Xaa at this position is a single (one, 1) amino acid selected from the following options: Arg Trp
  MISC_FEATURE (19)..(19): Xaa at this position is a single (one, 1) amino acid selected from the following options: Thr Ala
  MISC_FEATURE (22)..(22): Xaa at this position is a single (one, 1) amino acid selected from the following options: Ala Gly
  MISC_FEATURE (28)..(28): Xaa at this position is a single (one, 1) amino acid selected from the following options: Asp Glu
  MISC_FEATURE (29)..(29): Xaa at this position is a single (one, 1) amino acid selected from the following options: Gln Ser
  MISC_FEATURE (30)..(30): Xaa at this position is a single (one, 1) amino acid selected from the following options: Ser Ala
  MISC_FEATURE (31)..(31): Xaa at this position is a single (one, 1) amino acid selected from the following options: Glu Asp
  MISC_FEATURE (33)..(33): Xaa at this position is a single (one, 1) amino acid selected from the following options: Val Leu
  MISC_FEATURE (34)..(34): Xaa at this position is a single (one, 1) amino acid selected from the following options: Asp Gly
  MISC_FEATURE (35)..(35): Xaa at this position is a single (one, 1) amino acid selected from the following options: Arg Ser
  MISC_FEATURE (36)..(36): Xaa at this position is a single (one, 1) amino acid selected from the following options: Gly Ser
  MISC_FEATURE (39)..(39): Xaa at this position is a single (one, 1) amino acid selected from the following options: Ser Thr Ala
  MISC_FEATURE (40)..(40): Xaa at this position is a single (one, 1) amino acid selected from the following options: Ile Val
  MISC_FEATURE (42)..(42): Xaa at this position is a single (one, 1) amino acid selected from the following options: Glu Asp
  MISC_FEATURE (50)..(50): Xaa at this position is a single (one, 1) amino acid selected from the following options: Arg Lys
  MISC_FEATURE (51)..(51): Xaa at this position is a single (one, 1) amino acid selected from the following options: Glu Gln Ala
  MISC_FEATURE (54)..(54): Xaa at this position is a single (one, 1) amino acid selected from the following options: Glu Asp
  MISC_FEATURE (56)..(56): Xaa at this position is a single (one, 1) amino acid selected from the following options: Glu Asp
  MISC_FEATURE (62)..(62): Xaa at this position is a single (one, 1) amino acid selected from the following options: Gln Arg
  MISC_FEATURE (63)..(63): Xaa at this position is a single (one, 1) amino acid selected from the following options: Ser Thr Ala
  MISC_FEATURE (64)..(64): Xaa at this position is a single (one, 1) amino acid selected from the following options: Arg Lys
  MISC_FEATURE (71)..(71): Xaa at this position is a single (one, 1) amino acid selected from the following options: Lys Arg
  MISC_FEATURE (73)..(73): Xaa at this position is a single (one, 1) amino acid selected from the following options: His Tyr Ala
  MISC_FEATURE (74)..(74): Xaa at this position is a single (one, 1) amino acid selected from the following options: His Lys Ala
  MISC_FEATURE (76)..(76): Xaa at this position is a single (one, 1) amino acid selected from the following options: Glu Asp Asn
  MISC_FEATURE (79)..(79): Xaa at this position is a single (one, 1) amino acid selected from the following options: Val Ser
  MISC_FEATURE (80)..(80): Xaa at this position is a single (one, 1) amino acid selected from the following options: His Ala
  MISC_FEATURE (81)..(81): Xaa at this position is a single (one, 1) amino acid selected from the following options: His Ala
  MISC_FEATURE (82)..(82): Xaa at this position is a single (one, 1) amino acid selected from the following options: Lys Val Met
  MISC_FEATURE (87)..(87): Xaa at this position is a single (one, 1) amino acid selected from the following options: Arg His
  MISC_FEATURE (91)..(91): Xaa at this position is a single (one, 1) amino acid selected from the following options: Glu Gln
  MISC_FEATURE (98)..(98): Xaa at this position is a single (one, 1) amino acid selected from the following options: Lys Ser
  MISC_FEATURE (101)..(101): Xaa at this position is a single (one, 1) amino acid selected from the following options: Met Thr Lys
  MISC_FEATURE (106)..(106): Asp or is absent (no amino acid at this position and so this position is not present)
  MISC_FEATURE (107)..(107): Asp or is absent (no amino acid at this position and so this position is not present)
  MISC_FEATURE (108)..(108): Asp or is absent (no amino acid at this position and so this position is not present)
  MISC_FEATURE (109)..(109): Asp or is absent (no amino acid at this position and so this position is not present)

SEQ ID NO: 41 - protein, 107 aa, Artificial Sequence; identical to SEQ ID NO: 24
  Designed; as detailed elsewhere in present application
  misc_feature (3)..(3): Xaa at this position is a single (one, 1) amino acid selected from the following options: Ala Thr Val
  misc_feature (4)..(4): Xaa at this position is a single (one, 1) amino acid selected from the following options: Thr Ser
  misc_feature (5)..(5): Xaa at this position is a single (one, 1) amino acid selected from the following options: Ala Glu
  misc_feature (7)..(7): Xaa at this position is a single (one, 1) amino acid selected from the following options: Ala Val
  misc_feature (9)..(9): Xaa at this position is a single (one, 1) amino acid selected from the following options: Arg Trp
  misc_feature (10)..(10): Xaa at this position is a single (one, 1) amino acid selected from the following options: Thr Met
  misc_feature (11)..(11): Xaa at this position is a single (one, 1) amino acid selected from the following options: Arg Gln Trp
  misc_feature (12)..(12): Xaa at this position is a single (one, 1) amino acid selected from the following options: Phe Leu
  misc_feature (13)..(13): Xaa at this position is a single (one, 1) amino acid selected from the following options: Gly Arg Tyr Cys
  misc_feature (14)..(14): Xaa at this position is a single (one, 1) amino acid selected from the following options: Val Ser Ala Met
  misc_feature (15)..(15): Xaa at this position is a single (one, 1) amino acid selected from the following options: Trp Leu
  misc_feature (16)..(16): Xaa at this position is a single (one, 1) amino acid selected from the following options: Ser Gly
  misc_feature (17)..(17): Xaa at this position is a single (one, 1) amino acid selected from the following options: Val Ala
  misc_feature (18)..(18): Xaa at this position is a single (one, 1) amino acid selected from the following options: Trp Arg
  misc_feature (19)..(19): Xaa at this position is a single (one, 1) amino acid selected from the following options: Ala Thr Val
  misc_feature (20)..(20): Xaa at this position is a single (one, 1) amino acid selected from the following options: Met Val Arg
  misc_feature (22)..(22): Xaa at this position is a single (one, 1) amino acid selected from the following options: Gly Ala Thr
  misc_feature (23)..(23): Xaa at this position is a single (one, 1) amino acid selected from the following options: Arg Leu Gln
  misc_feature (24)..(24): Xaa at this position is a single (one, 1) amino acid selected from the following options: Gly Ser
  misc_feature (26)..(26): Xaa at this position is a single (one, 1) amino acid selected from the following options: Gly Ser
  misc_feature (28)..(28): Xaa at this position is a single (one, 1) amino acid selected from the following options: Glu Asp
  misc_feature (29)..(29): Xaa at this position is a single (one, 1) amino acid selected from the following options: Ser Gln Pro
  misc_feature (30)..(30): Xaa at this position is a single (one, 1) amino acid selected from the following options: Ala Ser Pro
  misc_feature (31)..(31): Xaa at this position is a single (one, 1) amino acid selected from the following options: Asp Glu His
  misc_feature (32)..(32): Xaa at this position is a single (one, 1) amino acid selected from the following options: Asn Asp
  misc_feature (33)..(33): Xaa at this position is a single (one, 1) amino acid selected from the following options: Leu Val
  misc_feature (34)..(34): Xaa at this position is a single (one, 1) amino acid selected from the following options: Gly Asp Arg
  misc_feature (35)..(35): Xaa at this position is a single (one, 1) amino acid selected from the following options: Ser Arg
  misc_feature (36)..(36): Xaa at this position is a single (one, 1) amino acid selected from the following options: Ser Gly Thr Arg
  misc_feature (37)..(37): Xaa at this position is a single (one, 1) amino acid selected from the following options: Ala Glu Ser
  misc_feature (38)..(38): Xaa at this position is a single (one, 1) amino acid selected from the following options: Gly Ala
  misc_feature (39)..(39): Xaa at this position is a single (one, 1) amino acid selected from the following options: Ser Thr Ala
  misc_feature (40)..(40): Xaa at this position is a single (one, 1) amino acid selected from the following options: Ile Val
  misc_feature (41)..(41): Xaa at this position is a single (one, 1) amino acid selected from the following options: Arg Trp
  misc_feature (42)..(42): Xaa at this position is a single (one, 1) amino acid selected from the following options: Asp Asn Glu
  misc_feature (45)..(45): Xaa at this position is a single (one, 1) amino acid selected from the following options: Gly Val
  misc_feature (46)..(46): Xaa at this position is a single (one, 1) amino acid selected from the following options: Ala Asp
  misc_feature (48)..(48): Xaa at this position is a single (one, 1) amino acid selected from the following options: Gly Arg Ala
  misc_feature (50)..(50): Xaa at this position is a single (one, 1) amino acid selected from the following options: Lys Arg
  misc_feature (51)..(51): Xaa at this position is a single (one, 1) amino acid selected from the following options: Glu Gln Ala
  misc_feature (52)..(52): Xaa at this position is a single (one, 1) amino acid selected from the following options: Gln Ala
  misc_feature (54)..(54): Xaa at this position is a single (one, 1) amino acid selected from the following options: Glu Lys
  misc_feature (55)..(55): Xaa at this position is a single (one, 1) amino acid selected from the following options: Glu Gly
  misc_feature (59)..(59): Xaa at this position is a single (one, 1) amino acid selected from the following options: Phe Leu
  misc_feature (62)..(62): Xaa at this position is a single (one, 1) amino acid selected from the following options: Arg Gln
  misc_feature (63)..(63): Xaa at this position is a single (one, 1) amino acid selected from the following options: Ala Ser Thr
  misc_feature (64)..(64): Xaa at this position is a single (one, 1) amino acid selected from the following options: Lys Arg
  misc_feature (68)..(68): Xaa at this position is a single (one, 1) amino acid selected from the following options: Ala Thr
  misc_feature (69)..(69): Xaa at this position is a single (one, 1) amino acid selected from the following options: Ala Thr
  misc_feature (73)..(73): Xaa at this position is a single (one, 1) amino acid selected from the following options: His Tyr Ala
  misc_feature (74)..(74): Xaa at this position is a single (one, 1) amino acid selected from the following options: His Lys Ala
  misc_feature (76)..(76): Xaa at this position is a single (one, 1) amino acid selected from the following options: Asn Glu Asp
  misc_feature (79)..(79): Xaa at this position is a single (one, 1) amino acid selected from the following options: Ser Thr Gly Val
  misc_feature (80)..(80): Xaa at this position is a single (one, 1) amino acid selected from the following options: His Ala
  misc_feature (81)..(81): Xaa at this position is a single (one, 1) amino acid selected from the following options: His Ala
  misc_feature (82)..(82): Xaa at this position is a single (one, 1) amino acid selected from the following options: Val Met Lys Glu
  misc_feature (87)..(87): Xaa at this position is a single (one, 1) amino acid selected from the following options: His Arg
  misc_feature (90)..(90): Xaa at this position is a single (one, 1) amino acid selected from the following options: Lys Asn
  misc_feature (98)..(98): Xaa at this position is a single (one, 1) amino acid selected from the following options: Ser Lys
  misc_feature (101)..(101): Xaa at this position is a single (one, 1) amino acid selected from the following options: Lys Met Ile Thr
  misc_feature (104)..(104): Xaa at this position is a single (one, 1) amino acid selected from the following options: His Gln Arg Asp
  misc_feature (105)..(105): Xaa at this position is a single (one, 1) amino acid selected from the following options: Asp Asn
  misc_feature (107)..(107): Asp or is absent (no amino acid at this position and so this position is not present)

SEQ ID NO: 42 - protein, 107 aa, Artificial Sequence; identical to SEQ ID NO: 25
  Designed; as detailed elsewhere in present application
  MISC_FEATURE (11)..(11): Xaa at this position is a single (one, 1) amino acid selected from the following options: Arg Trp
  MISC_FEATURE (12)..(12): Xaa at this position is a single (one, 1) amino acid selected from the following options: Phe Leu
  MISC_FEATURE (16)..(16): Xaa at this position is a single (one, 1) amino acid selected from the following options: Ser Gly
  MISC_FEATURE (18)..(18): Xaa at this position is a single (one, 1) amino acid selected from the following options: Trp Arg
  MISC_FEATURE (19)..(19): Xaa at this position is a single (one, 1) amino acid selected from the following options: Ala Thr
  MISC_FEATURE (22)..(22): Xaa at this position is a single (one, 1) amino acid selected from the following options: Gly Ala
  MISC_FEATURE (28)..(28): Xaa at this position is a single (one, 1) amino acid selected from the following options: Glu Asp
  MISC_FEATURE (29)..(29): Xaa at this position is a single (one, 1) amino acid selected from the following options: Ser Gln
  MISC_FEATURE (30)..(30): Xaa at this position is a single (one, 1) amino acid selected from the following options: Ala Ser
  MISC_FEATURE (31)..(31): Xaa at this position is a single (one, 1) amino acid selected from the following options: Asp Glu
  MISC_FEATURE (34)..(34): Xaa at this position is a single (one, 1) amino acid selected from the following options: Gly Asp
  MISC_FEATURE (35)..(35): Xaa at this position is a single (one, 1) amino acid selected from the following options: Ser Arg
  MISC_FEATURE (36)..(36): Xaa at this position is a single (one, 1) amino acid selected from the following options: Ser Gly
  MISC_FEATURE (39)..(39): Xaa at this position is a single (one, 1) amino acid selected from the following options: Ser Thr Ala
  MISC_FEATURE (40)..(40): Xaa at this position is a single (one, 1) amino acid selected from the following options: Ile Val
  MISC_FEATURE (42)..(42): Xaa at this position is a single (one, 1) amino acid selected from the following options: Asp Glu
  MISC_FEATURE (50)..(50): Xaa at this position is a single (one, 1) amino acid selected from the following options: Lys Arg
  MISC_FEATURE (51)..(51): Xaa at this position is a single (one, 1) amino acid selected from the following options: Glu Gln Ala
  MISC_FEATURE (62)..(62): Xaa at this position is a single (one, 1) amino acid selected from the following options: Arg Gln
  MISC_FEATURE (64)..(64): Xaa at this position is a single (one, 1) amino acid selected from the following options: Lys Arg
  MISC_FEATURE (73)..(73): Xaa at this position is a single (one, 1) amino acid selected from the following options: His Tyr Ala
  MISC_FEATURE (74)..(74): Xaa at this position is a single (one, 1) amino acid selected from the following options: His Lys Ala
  MISC_FEATURE (76)..(76): Xaa at this position is a single (one, 1) amino acid selected from the following options: Asn Glu Asp
  MISC_FEATURE (79)..(79): Xaa at this position is a single (one, 1) amino acid selected from the following options: Ser Val
  MISC_FEATURE (80)..(80): Xaa at this position is a single (one, 1) amino acid selected from the following options: His Ala
  MISC_FEATURE (81)..(81): Xaa at this position is a single (one, 1) amino acid selected from the following options: His Ala
  MISC_FEATURE (82)..(82): Xaa at this position is a single (one, 1) amino acid selected from the following options: Val Met Lys
  MISC_FEATURE (87)..(87): Xaa at this position is a single (one, 1) amino acid selected from the following options: His Arg
  MISC_FEATURE (98)..(98): Xaa at this position is a single (one, 1) amino acid selected from the following options: Ser Lys

SEQ ID NO: 43 - protein, 108 aa, Artificial Sequence; identical to SEQ ID NO: 26
  Designed; as detailed elsewhere in present application
  MISC_FEATURE (3)..(3): Xaa at this position is a single (one, 1) amino acid selected from the following options: Val Ala Thr
  MISC_FEATURE (4)..(4): Xaa at this position is a single (one, 1) amino acid selected from the following options: Thr Val
  MISC_FEATURE (5)..(5): Xaa at this position is a single (one, 1) amino acid selected from the following options: Ala Glu
  MISC_FEATURE (7)..(7): Xaa at this position is a single (one, 1) amino acid selected from the following options: Ala Val
  MISC_FEATURE (9)..(9): Xaa at this position is a single (one, 1) amino acid selected from the following options: Arg Trp
  MISC_FEATURE (10)..(10): Xaa at this position is a single (one, 1) amino acid selected from the following options: Thr Met Val
  MISC_FEATURE (11)..(11): Xaa at this position is a single (one, 1) amino acid selected from the following options: Arg Trp Gln
  MISC_FEATURE (12)..(12): Xaa at this position is a single (one, 1) amino acid selected from the following options: Leu Phe
  MISC_FEATURE (13)..(13): Xaa at this position is a single (one, 1) amino acid selected from the following options: Gly Arg Tyr Cys
  MISC_FEATURE (14)..(14): Xaa at this position is a single (one, 1) amino acid selected from the following options: Val Ser Ala
  MISC_FEATURE (15)..(15): Xaa at this position is a single (one, 1) amino acid selected from the following options: Trp Leu
  MISC_FEATURE (16)..(16): Xaa at this position is a single (one, 1) amino acid selected from the following options: Gly Ser
  MISC_FEATURE (17)..(17): Xaa at this position is a single (one, 1) amino acid selected from the following options: Val Ala
  MISC_FEATURE (18)..(18): Xaa at this position is a single (one, 1) amino acid selected from the following options: Trp Arg
  MISC_FEATURE (19)..(19): Xaa at this position is a single (one, 1) amino acid selected from the following options: Ala Thr Val
  MISC_FEATURE (20)..(20): Xaa at this position is a single (one, 1) amino acid selected from the following options: Met Val
  MISC_FEATURE (22)..(22): Xaa at this position is a single (one, 1) amino acid selected from the following options: Gly Ala
  MISC_FEATURE (23)..(23): Xaa at this position is a single (one, 1) amino acid selected from the following options: Arg Gln Leu
  MISC_FEATURE (24)..(24): Xaa at this position is a single (one, 1) amino acid selected from the following options: Gly Met
  MISC_FEATURE (25)..(25): Xaa at this position is a single (one, 1) amino acid selected from the following options: Phe Gln
  MISC_FEATURE (26)..(26): Xaa at this position is a single (one, 1) amino acid selected from the following options: Gly Ser
  MISC_FEATURE (28)..(28): Xaa at this position is a single (one, 1) amino acid selected from the following options: Glu Asp
  MISC_FEATURE (29)..(29): Xaa at this position is a single (one, 1) amino acid selected from the following options: Ser Pro Gln
  MISC_FEATURE (30)..(30): Xaa at this position is a single (one, 1) amino acid selected from the following options: Ala Ser Pro
  MISC_FEATURE (31)..(31): Xaa at this position is a single (one, 1) amino acid selected from the following options: Asp Glu His
  MISC_FEATURE (32)..(32): Xaa at this position is a single (one, 1) amino acid selected from the following options: Asn Asp
  MISC_FEATURE (33)..(33): Xaa at this position is a single (one, 1) amino acid selected from the following options: Leu Val
  MISC_FEATURE (34)..(34): Xaa at this position is a single (one, 1) amino acid selected from the following options: Gly Asp Arg
  MISC_FEATURE (35)..(35): Xaa at this position is a single (one, 1) amino acid selected from the following options: Ser Arg
  MISC_FEATURE (36)..(36): Xaa at this position is a single (one, 1) amino acid selected from the following options: Ser Gly Arg Thr
  MISC_FEATURE (37)..(37): Xaa at this position is a single (one, 1) amino acid selected from the following options: Ala Glu
  MISC_FEATURE (38)..(38): Xaa at this position is a single (one, 1) amino acid selected from the following options: Gly Ala
  MISC_FEATURE (39)..(39): Xaa at this position is a single (one, 1) amino acid selected from the following options: Ser Thr Ala
  MISC_FEATURE (40)..(40): Xaa at this position is a single (one, 1) amino acid selected from the following options: Val Ile
  MISC_FEATURE (41)..(41): Xaa at this position is a single (one, 1) amino acid selected from the following options: Arg Trp
  MISC_FEATURE (42)..(42): Xaa at this position is a single (one, 1) amino acid selected from the following options: Asp Glu Asn
  MISC_FEATURE (45)..(45): Xaa at this position is a single (one, 1) amino acid selected from the following options: Gly Val
  MISC_FEATURE (46)..(46): Xaa at this position is a single (one, 1) amino acid selected from the following options: Ala Asp
  MISC_FEATURE (48)..(48): Xaa at this position is a single (one, 1) amino acid selected from the following options: Gly Arg Ala
  MISC_FEATURE (50)..(50): Xaa at this position is a single (one, 1) amino acid selected from the following options: Arg Lys
  MISC_FEATURE (51)..(51): Xaa at this position is a single (one, 1) amino acid selected from the following options: Glu Gln Ala
  MISC_FEATURE (52)..(52): Xaa at this position is a single (one, 1) amino acid selected from the following options: Gln Ala
  MISC_FEATURE (54)..(54): Xaa at this position is a single (one, 1) amino acid selected from the following options: Glu Lys
  MISC_FEATURE (55)..(55): Xaa at this position is a single (one, 1) amino acid selected from the following options: Glu Gly
  MISC_FEATURE (56)..(56): Xaa at this position is a single (one, 1) amino acid selected from the following options: Glu Gln
  MISC_FEATURE (59)..(59): Xaa at this position is a single (one, 1) amino acid selected from the following options: Phe Leu
  MISC_FEATURE (62)..(62): Xaa at this position is a single (one, 1) amino acid selected from the following options: Arg Gln Cys
  MISC_FEATURE (63)..(63): Xaa at this position is a single (one, 1) amino acid selected from the following options: Ala Ser
  MISC_FEATURE (64)..(64): Xaa at this position is a single (one, 1) amino acid selected from the following options: Lys Arg
  MISC_FEATURE (69)..(69): Xaa at this position is a single (one, 1) amino acid selected from the following options: Ala Thr
  MISC_FEATURE (73)..(73): Xaa at this position is a single (one, 1) amino acid selected from the following options: His Tyr Ala
  MISC_FEATURE (74)..(74): Xaa at this position is a single (one, 1) amino acid selected from the following options: His Lys Ala
  MISC_FEATURE (76)..(76): Xaa at this position is a single (one, 1) amino acid selected from the following options: Asn Glu
  MISC_FEATURE (79)..(79): Xaa at this position is a single (one, 1) amino acid selected from the following options: Ser Val Thr
  MISC_FEATURE (80)..(80): Xaa at this position is a single (one, 1) amino acid selected from the following options: His Ala
  MISC_FEATURE (81)..(81): Xaa at this position is a single (one, 1) amino acid selected from the following options: His Ala
  MISC_FEATURE (82)..(82): Xaa at this position is a single (one, 1) amino acid selected from the following options: Val Lys Met Glu
  MISC_FEATURE (87)..(87): Xaa at this position is a single (one, 1) amino acid selected from the following options: His Arg Cys
  MISC_FEATURE (90)..(90): Xaa at this position is a single (one, 1) amino acid selected from the following options: Lys Asn
  MISC_FEATURE (92)..(92): Xaa at this position is a single (one, 1) amino acid selected from the following options: Ile Met
  MISC_FEATURE (94)..(94): Xaa at this position is a single (one, 1) amino acid selected from the following options: Arg Glu
  MISC_FEATURE (98)..(98): Xaa at this position is a single (one, 1) amino acid selected from the following options: Ser Lys Leu
  MISC_FEATURE (99)..(99): Xaa at this position is a single (one, 1) amino acid selected from the following options: Ile Val
  MISC_FEATURE (101)..(101): Xaa at this position is a single (one, 1) amino acid selected from the following options: Lys Met
  MISC_FEATURE (104)..(104): Xaa at this position is a single (one, 1) amino acid selected from the following options: His Gln
  MISC_FEATURE (105)..(105): Xaa at this position is a single (one, 1) amino acid selected from the following options: Asp His
  MISC_FEATURE (107)..(107): Asp or is absent (no amino acid at this position and so this position is not present)
  MISC_FEATURE (108)..(108): Asp or is absent (no amino acid at this position and so this position is not present)

SEQ ID NO: 44 - protein, 108 aa, Artificial Sequence; identical to SEQ ID NO: 27
  Designed; as detailed elsewhere in present application
  MISC_FEATURE (16)..(16): Xaa at this position is a single (one, 1) amino acid selected from the following options: Gly Ser
  MISC_FEATURE (18)..(18): Xaa at this position is a single (one, 1) amino acid selected from the following options: Trp Arg
  MISC_FEATURE (19)..(19): Xaa at this position is a single (one, 1) amino acid selected from the following options: Ala Thr
  MISC_FEATURE (22)..(22): Xaa at this position is a single (one, 1) amino acid selected from the following options: Gly Ala
  MISC_FEATURE (23)..(23): Xaa at this position is a single (one, 1) amino acid selected from the following options: Arg Gln
  MISC_FEATURE (26)..(26): Xaa at this position is a single (one, 1) amino acid selected from the following options: Gly Ser
  MISC_FEATURE (28)..(28): Xaa at this position is a single (one, 1) amino acid selected from the following options: Glu Asp
  MISC_FEATURE (29)..(29): Xaa at this position is a single (one, 1) amino acid selected from the following options: Ser Gln
  MISC_FEATURE (30)..(30): Xaa at this position is a single (one, 1) amino acid selected from the following options: Ala Ser
  MISC_FEATURE (31)..(31): Xaa at this position is a single (one, 1) amino acid selected from the following options: Asp Glu
  MISC_FEATURE (32)..(32): Xaa at this position is a single (one, 1) amino acid selected from the following options: Asn Asp
  MISC_FEATURE (34)..(34): Xaa at this position is a single (one, 1) amino acid selected from the following options: Gly Asp
  MISC_FEATURE (35)..(35): Xaa at this position is a single (one, 1) amino acid selected from the following options: Ser Arg
  MISC_FEATURE (36)..(36): Xaa at this position is a single (one, 1) amino acid selected from the following options: Ser Gly
  MISC_FEATURE (39)..(39): Xaa at this position is a single (one, 1) amino acid selected from the following options: Ser Thr Ala
  MISC_FEATURE (40)..(40): Xaa at this position is a single (one, 1) amino acid selected from the following options: Val Ile
  MISC_FEATURE (41)..(41): Xaa at this position is a single (one, 1) amino acid selected from the following options: Arg Trp
  MISC_FEATURE (42)..(42): Xaa at this position is a single (one, 1) amino acid selected from the following options: Asp Glu
  MISC_FEATURE (45)..(45): Xaa at this position is a single (one, 1) amino acid selected from the following options: Gly Val
  MISC_FEATURE (46)..(46): Xaa at this position is a single (one, 1) amino acid selected from the following options: Ala Asp
  MISC_FEATURE (48)..(48): Xaa at this position is a single (one, 1) amino acid selected from the following options: Gly Ala
  MISC_FEATURE (50)..(50): Xaa at this position is a single (one, 1) amino acid selected from the following options: Arg Lys
  MISC_FEATURE (51)..(51): Xaa at this position is a single (one, 1) amino acid selected from the following options: Glu Gln Ala
  MISC_FEATURE (52)..(52): Xaa at this position is a single (one, 1) amino acid selected from the following options: Gln Ala
  MISC_FEATURE (54)..(54): Xaa at this position is a single (one, 1) amino acid selected from the following options: Glu Lys
  MISC_FEATURE (55)..(55): Xaa at this position is a single (one, 1) amino acid selected from the following options: Glu Gly
  MISC_FEATURE (56)..(56): Xaa at this position is a single (one, 1) amino acid selected from the following options: Glu Gln
  MISC_FEATURE (59)..(59): Xaa at this position is a single (one, 1) amino acid selected from the following options: Phe Leu
  MISC_FEATURE (62)..(62): Xaa at this position is a single (one, 1) amino acid selected from the following options: Arg Gln
  MISC_FEATURE (63)..(63): Xaa at this position is a single (one, 1) amino acid selected from the following options: Ala Ser
  MISC_FEATURE (64)..(64): Xaa at this position is a single (one, 1) amino acid selected from the following options: Lys Arg
  MISC_FEATURE (73)..(73): Xaa at this position is a single (one, 1) amino acid selected from the following options: His Tyr Ala
  MISC_FEATURE (74)..(74): Xaa at this position is a single (one, 1) amino acid selected from the following options: His Lys Ala
  MISC_FEATURE (76)..(76): Xaa at this position is a single (one, 1) amino acid selected from the following options: Asn Glu
  MISC_FEATURE (79)..(79): Xaa at this position is a single (one, 1) amino acid selected from the following options: Ser Val
  MISC_FEATURE (80)..(80): Xaa at this position is a single (one, 1) amino acid selected from the following options: His Ala
  MISC_FEATURE (81)..(81): Xaa at this position is a single (one, 1) amino acid selected from the following options: His Ala
  MISC_FEATURE (82)..(82): Xaa at this position is a single (one, 1) amino acid selected from the following options: Val Lys
  MISC_FEATURE (87)..(87): Xaa at this position is a single (one, 1) amino acid selected from the following options: His Arg
  MISC_FEATURE (98)..(98): Xaa at this position is a single (one, 1) amino acid selected from the following options: Ser Lys
  MISC_FEATURE (101)..(101): Xaa at this position is a single (one, 1) amino acid selected from the following options: Lys Met
  MISC_FEATURE (108)..(108): Asp or is absent (no amino acid at this position and so this position is not present)

SEQ ID NO: 45 - protein, 107 aa, Artificial Sequence; identical to SEQ ID NO: 28
  Designed; as detailed elsewhere in present application
  MISC_FEATURE (3)..(3): Xaa at this position is a single (one, 1) amino acid selected from the following options: Ala Val
  MISC_FEATURE (4)..(4): Xaa at this position is a single (one, 1) amino acid selected from the following options: Thr Val
  MISC_FEATURE (7)..(7): Xaa at this position is a single (one, 1) amino acid selected from the following options: Ala Val
  MISC_FEATURE (9)..(9): Xaa at this position is a single (one, 1) amino acid selected from the following options: Arg Trp
  MISC_FEATURE (10)..(10): Xaa at this position is a single (one, 1) amino acid selected from the following options: Thr Met
  MISC_FEATURE (11)..(11): Xaa at this position is a single (one, 1) amino acid selected from the following options: Arg Gln Trp
  MISC_FEATURE (12)..(12): Xaa at this position is a single (one, 1) amino acid selected from the following options: Phe Leu
  MISC_FEATURE (13)..(13): Xaa at this position is a single (one, 1) amino acid selected from the following options: Gly Arg
  MISC_FEATURE (16)..(16): Xaa at this position is a single (one, 1) amino acid selected from the following options: Gly Ser
  MISC_FEATURE (18)..(18): Xaa at this position is a single (one, 1) amino acid selected from the following options: Arg Trp
  MISC_FEATURE (19)..(19): Xaa at this position is a single (one, 1) amino acid selected from the following options: Thr Val Ala
  MISC_FEATURE (22)..(22): Xaa at this position is a single (one, 1) amino acid selected from the following options: Gly Ala
  MISC_FEATURE (23)..(23): Xaa at this position is a single (one, 1) amino acid selected from the following options: Arg Leu
  MISC_FEATURE (28)..(28): Xaa at this position is a single (one, 1) amino acid selected from the following options: Glu Asp
  MISC_FEATURE (29)..(29): Xaa at this position is a single (one, 1) amino acid selected from the following options: Ser Pro Gln
  MISC_FEATURE (30)..(30): Xaa at this position is a single (one, 1) amino acid selected from the following options: Ala Ser
  MISC_FEATURE (31)..(31): Xaa at this position is a single (one, 1) amino acid selected from the following options: Asp Glu
  MISC_FEATURE (33)..(33): Xaa at this position is a single (one, 1) amino acid selected from the following options: Leu Val
  MISC_FEATURE (34)..(34): Xaa at this position is a single (one, 1) amino acid selected from the following options: Gly Asp
  MISC_FEATURE (35)..(35): Xaa at this position is a single (one, 1) amino acid selected from the following options: Ser Arg
  MISC_FEATURE (36)..(36): Xaa at this position is a single (one, 1) amino acid selected from the following options: Ser Gly
  MISC_FEATURE (37)..(37): Xaa at this position is a single (one, 1) amino acid selected from the following options: Ala Glu
  MISC_FEATURE (38)..(38): Xaa at this position is a single (one, 1) amino acid selected from the following options: Gly Ala
  MISC_FEATURE (39)..(39): Xaa at this position is a single (one, 1) amino acid selected from the following options: Ser Thr Ala
  MISC_FEATURE (40)..(40): Xaa at this position is a single (one, 1) amino acid selected from the following options: Trp Val Ile
  MISC_FEATURE (41)..(41): Xaa at this position is a single (one, 1) amino acid selected from the following options: Arg Trp
  MISC_FEATURE (42)..(42): Xaa at this position is a single (one, 1) amino acid selected from the following options: Asn Glu Asp
  MISC_FEATURE (45)..(45): Xaa at this position is a single (one, 1) amino acid selected from the following options: Gly Val
  MISC_FEATURE (46)..(46): Xaa at this position is a single (one, 1) amino acid selected from the following options: Ala Asp
  MISC_FEATURE (48)..(48): Xaa at this position is a single (one, 1) amino acid selected from the following options: Gly Arg
  MISC_FEATURE (50)..(50): Xaa at this position is a single (one, 1) amino acid selected from the following options: Lys Arg
  MISC_FEATURE (51)..(51): Xaa at this position is a single (one, 1) amino acid selected from the following options: Glu Gln Ala
  MISC_FEATURE (54)..(54): Xaa at this position is a single (one, 1) amino acid selected from the following options: Glu Lys
  MISC_FEATURE (55)..(55): Xaa at this position is a single (one, 1) amino acid selected from the following options: Glu Gly
  MISC_FEATURE (59)..(59): Xaa at this position is a single (one, 1) amino acid selected from the following options: Phe Leu
  MISC_FEATURE (62)..(62): Xaa at this position is a single (one, 1) amino acid selected from the following options: Arg Gln
  MISC_FEATURE (63)..(63): Xaa at this position is a single (one, 1) amino acid selected from the following options: Ala Ser
  MISC_FEATURE (64)..(64): Xaa at this position is a single (one, 1) amino acid selected from the following options: Lys Arg
  MISC_FEATURE (73)..(73): Xaa at this position is a single (one, 1) amino acid selected from the following options: His Tyr Ala
  MISC_FEATURE (74)..(74): Xaa at this position is a single (one, 1) amino acid selected from the following options: His Lys Ala
  MISC_FEATURE (76)..(76): Xaa at this position is a single (one, 1) amino acid selected from the following options: Asn Glu
  MISC_FEATURE (79)..(79): Xaa at this position is a single (one, 1) amino acid selected from the following options: Ser Val
  MISC_FEATURE (80)..(80): Xaa at this position is a single (one, 1) amino acid selected from the following options: His Ala
  MISC_FEATURE (81)..(81): Xaa at this position is a single (one, 1) amino acid selected from the following options: His Ala
  MISC_FEATURE (82)..(82): Xaa at this position is a single (one, 1) amino acid selected from the following options: Val Lys
  MISC_FEATURE (87)..(87): Xaa at this position is a single (one, 1) amino acid selected from the following options: Arg His
  MISC_FEATURE (98)..(98): Xaa at this position is a single (one, 1) amino acid selected from the following options: Lys Ser
  MISC_FEATURE (101)..(101): Xaa at this position is a single (one, 1) amino acid selected from the following options: Met Lys
  MISC_FEATURE (107)..(107): Asp or is absent (no amino acid at this position and so this position is not present)

SEQ ID NO: 46 - protein, 107 aa, Artificial Sequence; identical to SEQ ID NO: 29
  Designed; as detailed elsewhere in present application
  MISC_FEATURE (39)..(39): Xaa at this position is a single (one, 1) amino acid selected from the following options: Ser Thr Ala
  MISC_FEATURE (51)..(51): Xaa at this position is a single (one, 1) amino acid selected from the following options: Glu Gln Ala
  MISC_FEATURE (73)..(73): Xaa at this position is a single (one, 1) amino acid selected from the following options: His Tyr Ala
  MISC_FEATURE (74)..(74): Xaa at this position is a single (one, 1) amino acid selected from the following options: His Lys Ala
  MISC_FEATURE (80)..(80): Xaa at this position is a single (one, 1) amino acid selected from the following options: His Ala
  MISC_FEATURE (81)..(81): Xaa at this position is a single (one, 1) amino acid selected from the following options: His Ala

SEQ ID NO: 47 - protein, 107 aa, Artificial Sequence; identical to SEQ ID NO: 30
  Designed; as detailed elsewhere in present application
  MISC_FEATURE (3)..(3): Xaa at this position is a single (one, 1) amino acid selected from the following options: Val Gly Ala Thr
  MISC_FEATURE (4)..(4): Xaa at this position is a single (one, 1) amino acid selected from the following options: Thr Ser Pro
  MISC_FEATURE (5)..(5): Xaa at this position is a single (one, 1) amino acid selected from the following options: Ala Val Glu
  MISC_FEATURE (6)..(6): Xaa at this position is a single (one, 1) amino acid selected from the following options: Leu Thr Gln
  MISC_FEATURE (7)..(7): Xaa at this position is a single (one, 1) amino acid selected from the following options: Ala Val
  MISC_FEATURE (8)..(8): Xaa at this position is a single (one, 1) amino acid selected from the following options: Ala Val Leu Ile Thr
  MISC_FEATURE (9)..(9): Xaa at this position is a single (one, 1) amino acid selected from the following options: Arg Gln Trp
  MISC_FEATURE (10)..(10): Xaa at this position is a single (one, 1) amino acid selected from the following options: Thr Val Met Ala Ser Leu
  MISC_FEATURE (11)..(11): Xaa at this position is a single (one, 1) amino acid selected from the following options: Trp Arg Gln
  MISC_FEATURE (12)..(12): Xaa at this position is a single (one, 1) amino acid selected from the following options: Leu Phe Gln
  MISC_FEATURE (13)..(13): Xaa at this position is a single (one, 1) amino acid selected from the following options: Gly Tyr Cys Ala Arg
  MISC_FEATURE (14)..(14): Xaa at this position is a single (one, 1) amino acid selected from the following options: Val Ser Ala Thr Met Arg
  MISC_FEATURE (15)..(15): Xaa at this position is a single (one, 1) amino acid selected from the following options: Trp Leu
  MISC_FEATURE (16)..(16): Xaa at this position is a single (one, 1) amino acid selected from the following options: Gly Ser
  MISC_FEATURE (17)..(17): Xaa at this position is a single (one, 1) amino acid selected from the following options: Val Ala Met
  MISC_FEATURE (18)..(18): Xaa at this position is a single (one, 1) amino acid selected from the following options: Arg Trp Lys Leu
  MISC_FEATURE (19)..(19): Xaa at this position is a single (one, 1) amino acid selected from the following options: Thr Ala Val Ser
  MISC_FEATURE (20)..(20): Xaa at this position is a single (one, 1) amino acid selected from the following options: Met Leu Ile Arg Val Ala Thr
  MISC_FEATURE (21)..(21): Xaa at this position is a single (one, 1) amino acid selected from the following options: Gln Arg
  MISC_FEATURE (22)..(22): Xaa at this position is a single (one, 1) amino acid selected from the following options: Ala Thr Gly Ser
  MISC_FEATURE (23)..(23): Xaa at this position is a single (one, 1) amino acid selected from the following options: Arg Gln Gly Leu
  MISC_FEATURE (24)..(24): Xaa at this position is a single (one, 1) amino acid selected from the following options: Gly Ser
  MISC_FEATURE (25)..(25): Xaa at this position is a single (one, 1) amino acid selected from the following options: Phe Tyr
  MISC_FEATURE (39)..(39): Xaa at this position is a single (one, 1) amino acid selected from the following options: Ser Thr Ala
  MISC_FEATURE (51)..(51): Xaa at this position is a single (one, 1) amino acid selected from the following options: Glu Gln Ala
  MISC_FEATURE (73)..(73): Xaa at this position is a single (one, 1) amino acid selected from the following options: His Tyr Ala
  MISC_FEATURE (74)..(74): Xaa at this position is a single (one, 1) amino acid selected from the following options: His Lys Ala
  MISC_FEATURE (80)..(80): Xaa at this position is a single (one, 1) amino acid selected from the following options: His Ala
  MISC_FEATURE (81)..(81): Xaa at this position is a single (one, 1) amino acid selected from the following options: His Ala

SEQ ID NO: 48 - protein, 107 aa, Artificial Sequence; identical to SEQ ID NO: 31
  Designed; as detailed elsewhere in present application
  MISC_FEATURE (39)..(39): Xaa at this position is a single (one, 1) amino acid selected from the following options: Ser Thr Ala
  MISC_FEATURE (51)..(51): Xaa at this position is a single (one, 1) amino acid selected from the following options: Glu Gln Ala
  MISC_FEATURE (73)..(73): Xaa at this position is a single (one, 1) amino acid selected from the following options: His Tyr Ala
  MISC_FEATURE (74)..(74): Xaa at this position is a single (one, 1) amino acid selected from the following options: His Lys Ala
  MISC_FEATURE (80)..(80): Xaa at this position is a single (one, 1) amino acid selected from the following options: His Ala
  MISC_FEATURE (81)..(81): Xaa at this position is a single (one, 1) amino acid selected from the following options: His Ala

SEQ ID NO: 49 - protein, 107 aa, Artificial Sequence; identical to SEQ ID NO: 32
  Designed; as detailed elsewhere in present application
  MISC_FEATURE (39)..(39): Xaa at this position is a single (one, 1) amino acid selected from the following options: Ser Thr Ala
  MISC_FEATURE (51)..(51): Xaa at this position is a single (one, 1) amino acid selected from the following options: Glu Gln Ala
  MISC_FEATURE (73)..(73): Xaa at this position is a single (one, 1) amino acid selected from the following options: His Tyr Ala
  MISC_FEATURE (74)..(74): Xaa at this position is a single (one, 1) amino acid selected from the following options: His Lys Ala
  MISC_FEATURE (80)..(80): Xaa at this position is a single (one, 1) amino acid selected from the following options: His Ala
  MISC_FEATURE (81)..(81): Xaa at this position is a single (one, 1) amino acid selected from the following options: His Ala

SEQ ID NO: 50 - protein, 110 aa, Artificial Sequence; identical to SEQ ID NO: 33
  Designed; as detailed elsewhere in present application
  MISC_FEATURE (3)..(3): Xaa at this position is a single (one, 1) amino acid selected from the following options: Val Gly Ala Thr
  MISC_FEATURE (4)..(4): Xaa at this position is a single (one, 1) amino acid selected from the following options: Thr Ser Pro
  MISC_FEATURE (5)..(5): Xaa at this position is a single (one, 1) amino acid selected from the following options: Glu Ala Val
  MISC_FEATURE (6)..(6): Xaa at this position is a single (one, 1) amino acid selected from the following options: Leu Thr Gln
  MISC_FEATURE (7)..(7): Xaa at this position is a single (one, 1) amino acid selected from the following options: Ala Val
  MISC_FEATURE (8)..(8): Xaa at this position is a single (one, 1) amino acid selected from the following options: Ala Val Leu Ile Thr
  MISC_FEATURE (9)..(9): Xaa at this position is a single (one, 1) amino acid selected from the following options: Trp Arg Gln
  MISC_FEATURE (10)..(10): Xaa at this position is a single (one, 1) amino acid selected from the following options: Thr Val Met Ala Ser Leu
  MISC_FEATURE (11)..(11): Xaa at this position is a single (one, 1) amino acid selected from the following options: Gln Trp Arg
  MISC_FEATURE (12)..(12): Xaa at this position is a single (one, 1) amino acid selected from the following options: Leu Phe Gln
  MISC_FEATURE (13)..(13): Xaa at this position is a single (one, 1) amino acid selected from the following options: Arg Gly Tyr Cys Ala
  MISC_FEATURE (14)..(14): Xaa at this position is a single (one, 1) amino acid selected from the following options: Val Ser Ala Thr Met Arg
  MISC_FEATURE (15)..(15): Xaa at this position is a single (one, 1) amino acid selected from the following options: Trp Leu
  MISC_FEATURE (16)..(16): Xaa at this position is a single (one, 1) amino acid selected from the following options: Gly Ser
  MISC_FEATURE (17)..(17): Xaa at this position is a single (one, 1) amino acid selected from the following options: Val Ala Met
  MISC_FEATURE (18)..(18): Xaa at this position is a single (one, 1) amino acid selected from the following options: Arg Trp Lys Leu
  MISC_FEATURE (19)..(19): Xaa at this position is a single (one, 1) amino acid selected from the following options: Thr Ala Val Ser
  MISC_FEATURE (20)..(20): Xaa at this position is a single (one, 1) amino acid selected from the following options: Met Leu Ile Arg Val Ala Thr
  MISC_FEATURE (21)..(21): Xaa at this position is a single (one, 1) amino acid selected from the following options: Gln Arg
  MISC_FEATURE (22)..(22): Xaa at this position is a single (one, 1) amino acid selected from the following options: Ala Thr Gly Ser
  MISC_FEATURE (23)..(23): Xaa at this position is a single (one, 1) amino acid selected from the following options: Leu Arg Gln Gly
  MISC_FEATURE (24)..(24): Xaa at this position is a single (one, 1) amino acid selected from the following options: Gly Ser
  MISC_FEATURE (25)..(25): Xaa at this position is a single (one, 1) amino acid selected from the following options: Phe Tyr
  MISC_FEATURE (26)..(26): Xaa at this position is a single (one, 1) amino acid selected from the following options: Gly Ser Val Ala Thr Leu Arg Phe Ile Lys Met Gln Asn
  MISC_FEATURE (27)..(27): Xaa at this position is a single (one, 1) amino acid selected from the following options: Ser Cys Arg Gly Phe Thr Pro
  MISC_FEATURE (28)..(28): Xaa at this position is a single (one, 1) amino acid selected from the following options: Asp Glu Gly Ser Phe Lys Thr Leu Phe Pro
  MISC_FEATURE (29)..(29): Xaa at this position is a single (one, 1) amino acid selected from the following options: Pro Gln Arg Ser Thr Lys Gly Glu Ala Phe
  MISC_FEATURE (30)..(30): Xaa at this position is a single (one, 1) amino acid selected from the following options: Ser Pro Ala Gly Arg Glu Asp Val
  MISC_FEATURE (31)..(31): Xaa at this position is a single (one, 1) amino acid selected from the following options: Glu Asp Lys His Ala Gly Asn Ser Arg Gln Asp Thr Leu Val
  MISC_FEATURE (32)..(32): Xaa at this position is a single (one, 1) amino acid selected from the following options: Asn Asp Tyr Ser Gly Arg His Lys Glu Ala Leu
  MISC_FEATURE (33)..(33): Xaa at this position is a single (one, 1) amino acid selected from the following options: Val Leu Pro His Met Ile Phe Thr Gly Gly Ser Asp Glu Phe
  MISC_FEATURE (34)..(34): Xaa at this position is a single (one, 1) amino acid selected from the following options: Asp Gly His Arg Ser Glu Pro
  MISC_FEATURE (35)..(35): Xaa at this position is a single (one, 1) amino acid selected from the following options: Arg Ser Gly Thr Pro Ala Lys Glu
  MISC_FEATURE (36)..(36): Xaa at this position is a single (one, 1) amino acid selected from the following options: Arg Thr Gly Ser Arg Pro Lys Asp Ala
  MISC_FEATURE (37)..(37): Xaa at this position is a single (one, 1) amino acid selected from the following options: Ala Glu Ser Gly Arg
  MISC_FEATURE (38)..(38): Xaa at this position is a single (one, 1) amino acid selected from the following options: Ala Gly Gln Pro
  MISC_FEATURE (39)..(39): Xaa at this position is a single (one, 1) amino acid selected from the following options: Ser Thr Ala
  MISC_FEATURE (40)..(40): Xaa at this position is a single (one, 1) amino acid selected from the following options: Ile Val Leu Glu Phe
  MISC_FEATURE (41)..(41): Xaa at this position is a single (one, 1) amino acid selected from the following options: Trp Arg Lys Glu Thr Tyr
  MISC_FEATURE (42)..(42): Xaa at this position is a single (one, 1) amino acid selected from the following options: Asn Glu Asp Ala Lys Ser
  MISC_FEATURE (43)..(43): Xaa at this position is a single (one, 1) amino acid selected from the following options: Ala Arg Lys Cys
  MISC_FEATURE (44)..(44): Xaa at this position is a single (one, 1) amino acid selected from the following options: Gly Tyr Glu Pro
  MISC_FEATURE (45)..(45): Xaa at this position is a single (one, 1) amino acid selected from the following options: Val Gly Phe Lys Arg
  MISC_FEATURE (46)..(46): Xaa at this position is a single (one, 1) amino acid selected from the following options: Asp Ala Ser Arg Leu
  MISC_FEATURE (47)..(47): Xaa at this position is a single (one, 1) amino acid selected from the following options: Phe Leu Ile Glu Ser
  MISC_FEATURE (48)..(48): Xaa at this position is a single (one, 1) amino acid selected from the following options: Arg Gly Ala Ile Glu Ser Pro
  MISC_FEATURE (49)..(49): Xaa at this position is a single (one, 1) amino acid selected from the following options: Lys Arg Thr Glu Gln
  MISC_FEATURE (50)..(50): Xaa at this position is a single (one, 1) amino acid selected from the following options: Arg Lys Met
  MISC_FEATURE (51)..(51): Xaa at this position is a single (one, 1) amino acid selected from the following options: Glu Gln Ala
  MISC_FEATURE (52)..(52): Xaa at this position is a single (one, 1) amino acid selected from the following options: Gln Ala Lys Arg Pro Phe Val
  MISC_FEATURE (53)..(53): Xaa at this position is a single (one, 1) amino acid selected from the following options: Ala Ser Arg
  MISC_FEATURE (54)..(54): Xaa at this position is a single (one, 1) amino acid selected from the following options: Lys Glu Asp His Ala Ile
  MISC_FEATURE (55)..(55): Xaa at this position is a single (one, 1) amino acid selected from the following options: Gly Glu Pro Arg
  MISC_FEATURE (56)..(56): Xaa at this position is a single (one, 1) amino acid selected from the following options: Glu Asp Tyr Thr Gln
  MISC_FEATURE (57)..(57): Xaa at this position is a single (one, 1) amino acid selected from the following options: Arg Met Lys
  MISC_FEATURE (58)..(58): Xaa at this position is a single (one, 1) amino acid selected from the following options: Tyr Phe Glu
  MISC_FEATURE (59)..(59): Xaa at this position is a single (one, 1) amino acid selected from the following options: Leu Phe Pro Gln
  MISC_FEATURE (60)..(60): Xaa at this position is a single (one, 1) amino acid selected from the following options: Arg Leu Lys
  MISC_FEATURE (61)..(61): Xaa at this position is a single (one, 1) amino acid selected from the following options: Ala Lys Glu Thr Asp Gln Arg
  MISC_FEATURE (62)..(62): Xaa at this position is a single (one, 1) amino acid selected from the following options: Gln Arg Lys Ala Cys
  MISC_FEATURE (63)..(63): Xaa at this position is a single (one, 1) amino acid selected from the following options: Ser Thr Ala Asn Glu Leu
  MISC_FEATURE (64)..(64): Xaa at this position is a single (one, 1) amino acid selected from the following options: Arg Lys Gln His Ala
  MISC_FEATURE (65)..(65): Xaa at this position is a single (one, 1) amino acid selected from the following options: Glu Gln Lys
  MISC_FEATURE (66)..(66): Xaa at this position is a single (one, 1) amino acid selected from the following options: Gln Lys
  MISC_FEATURE (67)..(67): Xaa at this position is a single (one, 1) amino acid selected from the following options: Leu His Met Glu
  MISC_FEATURE (68)..(68): Xaa at this position is a single (one, 1) amino acid selected from the following options: Ala Leu Glu Thr Asp Ser
  MISC_FEATURE (69)..(69): Xaa at this position is a single (one, 1) amino acid selected from the following options: Ala Thr Arg Ile Ser Asn Val Met Asp
  MISC_FEATURE (70)..(70): Xaa at this position is a single (one, 1) amino acid selected from the following options: Leu Glu
  MISC_FEATURE (71)..(71): Xaa at this position is a single (one, 1) amino acid selected from the following options: Lys Arg Ile
  MISC_FEATURE (72)..(72): Xaa at this position is a single (one, 1) amino acid selected from the following options: Lys Asn Arg Thr Glu
  MISC_FEATURE (73)..(73): Xaa at this position is a single (one, 1) amino acid selected from the following options: His Tyr Ala
  MISC_FEATURE (74)..(74): Xaa at this position is a single (one, 1) amino acid selected from the following options: His Lys Ala
  MISC_FEATURE (75)..(75): Xaa at this position is a single (one, 1) amino acid selected from the following options: Glu Gln Lys Val
  MISC_FEATURE (76)..(76): Xaa at this position is a single (one, 1) amino acid selected from the following options: Glu Asp Asn Lys
  MISC_FEATURE (77)..(77): Xaa at this position is a single (one, 1) amino acid selected from the following options: Glu Val
  MISC_FEATURE (78)..(78): Xaa at this position is a single (one, 1) amino acid selected from the following options: Ile Val
  MISC_FEATURE (79)..(79): Xaa at this position is a single (one, 1) amino acid selected from the following options: Val Thr Ser Asp Asn Gly Ala Glu Gln Tyr Arg
  MISC_FEATURE (80)..(80): Xaa at this position is a single (one, 1) amino acid selected from the following options: His Ala
  MISC_FEATURE (81)..(81): Xaa at this position is a single (one, 1) amino acid selected from the following options: His Ala
  MISC_FEATURE (82)..(82): Xaa at this position is a single (one, 1) amino acid selected from the following options: Lys Ser Met Val His Ala Arg Gln Glu Ile Leu Val
  MISC_FEATURE (83)..(83): Xaa at this position is a single (one, 1) amino acid selected from the following options: Lys Glu Gln Arg Gly
  MISC_FEATURE (84)..(84): Xaa at this position is a single (one, 1) amino acid selected from the following options: Glu Ala Gln
  MISC_FEATURE (86)..(86): Xaa at this position is a single (one, 1) amino acid selected from the following options: Glu Lys Asp Gln
  MISC_FEATURE (87)..(87): Xaa at this position is a single (one, 1) amino acid selected from the following options: Arg His Leu Gln Cys Val Gln
  MISC_FEATURE (88)..(88): Xaa at this position is a single (one, 1) amino acid selected from the following options: Leu Met
  MISC_FEATURE (89)..(89): Xaa at this position is a single (one, 1) amino acid selected from the following options: Gln Glu Lys
  MISC_FEATURE (90)..(90): Xaa at this position is a single (one, 1) amino acid selected from the following options: Lys Asn Arg Gln
  MISC_FEATURE (91)..(91): Xaa at this position is a single (one, 1) amino acid selected from the following options: Glu Gln Asn
  MISC_FEATURE (92)..(92): Xaa at this position is a single (one, 1) amino acid selected from the following options: Ile Met
  MISC_FEATURE (93)..(93): Xaa at this position is a single (one, 1) amino acid selected from the following options: Glu Gln Asp Ile Lys
  MISC_FEATURE (94)..(94): Xaa at this position is a single (one, 1) amino acid selected from the following options: Arg Gln Lys Glu
  MISC_FEATURE (95)..(95): Xaa at this position is a single (one, 1) amino acid selected from the following options: His Leu Ile
  MISC_FEATURE (96)..(96): Xaa at this position is a single (one, 1) amino acid selected from the following options: Lys Gln Glu
  MISC_FEATURE (97)..(97): Xaa at this position is a single (one, 1) amino acid selected from the following options: Gln Lys Glu Tyr Gly Ser His Asp Asn
  MISC_FEATURE (98)..(98): Xaa at this position is a single (one, 1) amino acid selected from the following options: Lys Arg Ser Ala Asn Thr His Ser Leu
  MISC_FEATURE (99)..(99): Xaa at this position is a single (one, 1) amino acid selected from the following options: Ile Met Asp Val
  MISC_FEATURE (100)..(100): Xaa at this position is a single (one, 1) amino acid selected from the following options: Lys Gln Arg Asn
  MISC_FEATURE (101)..(101): Xaa at this position is a single (one, 1) amino acid selected from the following options: Met Thr Lys His Tyr Ser Gln Ile Val Asn Asp Arg
  MISC_FEATURE (103)..(103): Xaa at this position is a single (one, 1) amino acid selected from the following options: Lys Asn Ser His Arg Thr Gly
  MISC_FEATURE (104)..(104): Xaa at this position is a single (one, 1) amino acid selected from the following options: His Asp Asn Ser Arg Gln Glu Tyr Asn Leu Gln Gly
  MISC_FEATURE (105)..(105): Xaa at this position is a single (one, 1) amino acid selected from the following options: Asp His Ser Asn Ile or is absent (no amino acid at this position and so this position is not present)
  MISC_FEATURE (106)..(106): Xaa at this position is a single (one, 1) amino acid selected from the following options: Asp Glu His Gly Asn or is absent (no amino acid at this position and so this position is not present)
  MISC_FEATURE (107)..(107): Xaa at this position is a single (one, 1) amino acid selected from the following options: Asp His or is absent (no amino acid at this position and so this position is not present)
  MISC_FEATURE (108)..(108): Xaa at this position is a single (one, 1) amino acid selected from the following options: Asp Glu or is absent (no amino acid at this position and so this position is not present)
  MISC_FEATURE (109)..(109): Asp or is absent (no amino acid at this position and so this position is not present)
  MISC_FEATURE (110)..(110): Asp or is absent (no amino acid at this position and so this position is not present)

SEQ ID NO: 51 - protein, 108 aa, Artificial Sequence; identical to SEQ ID NO: 34
  Designed; as detailed elsewhere in present application
  MISC_FEATURE (3)..(3): Xaa at this position is a single (one, 1) amino acid selected from the following options: Val Gly Ala Thr
  MISC_FEATURE (4)..(4): Xaa at this position is a single (one, 1) amino acid selected from the following options: Thr Ser Pro
  MISC_FEATURE (5)..(5): Xaa at this position is a single (one, 1) amino acid selected from the following options: Ala Val Glu
  MISC_FEATURE (6)..(6): Xaa at this position is a single (one, 1) amino acid selected from the following options: Leu Thr Gln
  MISC_FEATURE (7)..(7): Xaa at this position is a single (one, 1) amino acid selected from the following options: Ala Val
  MISC_FEATURE (8)..(8): Xaa at this position is a single (one, 1) amino acid selected from the following options: Ala Val Leu Ile Thr
  MISC_FEATURE (9)..(9): Xaa at this position is a single (one, 1) amino acid selected from the following options: Arg Gln Trp
  MISC_FEATURE (10)..(10): Xaa at this position is a single (one, 1) amino acid selected from the following options: Thr Val Met Ala Ser Leu
  MISC_FEATURE (11)..(11): Xaa at this position is a single (one, 1) amino acid selected from the following options: Trp Arg Gln
  MISC_FEATURE (12)..(12): Xaa at this position is a single (one, 1) amino acid selected from the following options: Leu Phe Gln
  MISC_FEATURE (13)..(13): Xaa at this position is a single (one, 1) amino acid selected from the following options: Gly Tyr Cys Ala Arg
  MISC_FEATURE (14)..(14): Xaa at this position is a single (one, 1) amino acid selected from the following options: Val Ser Ala Thr Met Arg
  MISC_FEATURE (15)..(15): Xaa at this position is a single (one, 1) amino acid selected from the following options: Trp Leu
  MISC_FEATURE (16)..(16): Xaa at this position is a single (one, 1) amino acid selected from the following options: Gly Ser
  MISC_FEATURE (17)..(17): Xaa at this position is a single (one, 1) amino acid selected from the following options: Val Ala Met
  MISC_FEATURE (18)..(18): Xaa at this position is a single (one, 1) amino acid selected from the following options: Arg Trp Lys Leu
  MISC_FEATURE (19)..(19): Xaa at this position is a single (one, 1) amino acid selected from the following options: Thr Ala Val Ser
  MISC_FEATURE (20)..(20): Xaa at this position is a single (one, 1) amino acid selected from the following options: Met Leu Ile Arg Val Ala Thr
  MISC_FEATURE (21)..(21): Xaa at this position is a single (one, 1) amino acid selected from the following options: Gln Arg
  MISC_FEATURE (22)..(22): Xaa at this position is a single (one, 1) amino acid selected from the following options: Ala Thr Gly Ser
  MISC_FEATURE (23)..(23): Xaa at this position is a single (one, 1) amino acid selected from the following options: Arg Gln Gly Leu
  MISC_FEATURE (24)..(24): Xaa at this position is a single (one, 1) amino acid selected from the following options: Gly Ser
  MISC_FEATURE (25)..(25): Xaa at this position is a single (one, 1) amino acid selected from the following options: Phe Tyr
  MISC_FEATURE (26)..(26): Xaa at this position is a single (one, 1) amino acid selected from the following options: Gly Leu
  MISC_FEATURE (27)..(27): Xaa at this position is a single (one, 1) amino acid selected from the following options: Ser Gly
  MISC_FEATURE (28)..(28): Xaa at this position is a single (one, 1) amino acid selected from the following options: Glu Asp Ser
  MISC_FEATURE (29)..(29): Xaa at this position is a single (one, 1) amino acid selected from the following options: Gly Ser Gln Pro
  MISC_FEATURE (30)..(30): Xaa at this position is a single (one, 1) amino acid selected from the following options: Ala Ser
  MISC_FEATURE (31)..(31): Xaa at this position is a single (one, 1) amino acid selected from the following options: Asp Gly Glu
  MISC_FEATURE (32)..(32): Xaa at this position is a single (one, 1) amino acid selected from the following options: Asn Lys
  MISC_FEATURE (33)..(33): Xaa at this position is a single (one, 1) amino acid selected from the following options: Leu Gly Val
  MISC_FEATURE (34)..(34): Xaa at this position is a single (one, 1) amino acid selected from the following options: Gly Asp
  MISC_FEATURE (35)..(35): Xaa at this position is a single (one, 1) amino acid selected from the following options: Ser Gly Arg
  MISC_FEATURE (36)..(36): Xaa at this position is a single (one, 1) amino acid selected from the following options: Ser Gly
  MISC_FEATURE (37)..(37): Xaa at this position is a single (one, 1) amino acid selected from the following options: Ala Gly Glu
  MISC_FEATURE (38)..(38): Xaa at this position is a single (one, 1) amino acid selected from the following options: Gly Ala
  MISC_FEATURE (39)..(39): Xaa at this position is a single (one, 1) amino acid selected from the following options: Ser Thr Ala
  MISC_FEATURE (40)..(40): Xaa at this position is a single (one, 1) amino acid selected from the following options: Ile Val
  MISC_FEATURE (41)..(41): Xaa at this position is a single (one, 1) amino acid selected from the following options: Arg Trp
  MISC_FEATURE (42)..(42): Xaa at this position is a single (one, 1) amino acid selected from the following options: Asp Glu Asn
  MISC_FEATURE (45)..(45): Xaa at this position is a single (one, 1) amino acid selected from the following options: Gly Val
  MISC_FEATURE (46)..(46): Xaa at this position is a single (one, 1) amino acid selected from the following options: Ala Asp
  MISC_FEATURE (48)..(48): Xaa at this position is a single (one, 1) amino acid selected from the following options: Gly Arg
  MISC_FEATURE (50)..(50): Xaa at this position is a single (one, 1) amino acid selected from the following options: Lys Arg
  MISC_FEATURE (51)..(51): Xaa at this position is a single (one, 1) amino acid selected from the following options: Glu Gln Ala
  MISC_FEATURE (52)..(52): Xaa at this position is a single (one, 1) amino acid selected from the following options: Gln Ala
  MISC_FEATURE (54)..(54): Xaa at this position is a single (one, 1) amino acid selected from the following options: Glu His Lys
  MISC_FEATURE (55)..(55): Xaa at this position is a single (one, 1) amino acid selected from the following options: Glu Gly
  MISC_FEATURE (59)..(59): Xaa at this position is a single (one, 1) amino acid selected from the following options: Phe Leu
  MISC_FEATURE (61)..(61): Xaa at this position is a single (one, 1) amino acid selected from the following options: Ala Glu Asp
  MISC_FEATURE (62)..(62): Xaa at this position is a single (one, 1) amino acid selected from the following options: Arg Lys Gln
  MISC_FEATURE (63)..(63): Xaa at this position is a single (one, 1) amino acid selected from the following options: Ala Glu Ser
  MISC_FEATURE (64)..(64): Xaa at this position is a single (one, 1) amino acid selected from the following options: Lys Arg
  MISC_FEATURE (69)..(69): Xaa at this position is a single (one, 1) amino acid selected from the following options: Ala Ser
  MISC_FEATURE (71)..(71): Xaa at this position is a single (one, 1) amino acid selected from the following options: Lys Arg
  MISC_FEATURE (72)..(72): Xaa at this position is a single (one, 1) amino acid selected from the following options: Lys Glu
  MISC_FEATURE (73)..(73): Xaa at this position is a single (one, 1) amino acid selected from the following options: His Tyr Ala
  MISC_FEATURE (74)..(74): Xaa at this position is a single (one, 1) amino acid selected from the following options: His Lys Ala
  MISC_FEATURE (76)..(76): Xaa at this position is a single (one, 1) amino acid selected from the following options: Glu Asn
  MISC_FEATURE (79)..(79): Xaa at this position is a single (one, 1) amino acid selected from the following options: Ser Asp Val
  MISC_FEATURE (80)..(80): Xaa at this position is a single (one, 1) amino acid selected from the following options: His Ala
  MISC_FEATURE (81)..(81): Xaa at this position is a single (one, 1) amino acid selected from the following options: His Ala
  MISC_FEATURE (82)..(82): Xaa at this position is a single (one, 1) amino acid selected from the following options: Lys Val
  MISC_FEATURE (86)..(86): Xaa at this position is a single (one, 1) amino acid selected from the following options: Glu Gln
  MISC_FEATURE (87)..(87): Xaa at this position is a single (one, 1) amino acid selected from the following options: His Arg
  MISC_FEATURE (93)..(93): Xaa at this position is a single (one, 1) amino acid selected from the following options: Glu Asp
  MISC_FEATURE (97)..(97): Xaa at this position is a single (one, 1) amino acid selected from the following options: Gln Asn
  MISC_FEATURE (98)..(98): Xaa at this position is a single (one, 1) amino acid selected from the following options: Ser Lys
  MISC_FEATURE (101)..(101): Xaa at this position is a single (one, 1) amino acid selected from the following options: Lys Met
  MISC_FEATURE (104)..(104): Xaa at this position is a single (one, 1) amino acid selected from the following options: His Gly
  MISC_FEATURE (107)..(107): Asp or is absent (no amino acid at this position and so this position is not present)
  MISC_FEATURE (108)..(108): Asp or is absent (no amino acid at this position and so this position is not present)

SEQ ID NO: 52 - protein, 108 aa, Artificial Sequence; identical to SEQ ID NO: 35
  Designed; as detailed elsewhere in present application
  MISC_FEATURE (3)..(3): Xaa at this position is a single (one, 1) amino acid selected from the following options: Val Gly Ala Thr
  MISC_FEATURE (4)..(4): Xaa at this position is a single (one, 1) amino acid selected from the following options: Thr Ser Pro
  MISC_FEATURE (5)..(5): Xaa at this position is a single (one, 1) amino acid selected from the following options: Ala Val Glu
  MISC_FEATURE (6)..(6): Xaa at this position is a single (one, 1) amino acid selected from the following options: Leu Thr Gln
  MISC_FEATURE (7)..(7): Xaa at this position is a single (one, 1) amino acid selected from the following options: Ala Val
  MISC_FEATURE (8)..(8): Xaa at this position is a single (one, 1) amino acid selected from the following options: Ala Val Leu Ile Thr
  MISC_FEATURE (9)..(9): Xaa at this position is a single (one, 1) amino acid selected from the following options: Arg Gln Trp
  MISC_FEATURE (10)..(10): Xaa at this position is a single (one, 1) amino acid selected from the following options: Thr Val Met Ala Ser Leu
  MISC_FEATURE (11)..(11): Xaa at this position is a single (one, 1) amino acid selected from the following options: Trp Arg Gln
  MISC_FEATURE (12)..(12): Xaa at this position is a single (one, 1) amino acid selected from the following options: Leu Phe Gln
  MISC_FEATURE (13)..(13): Xaa at this position is a single (one, 1) amino acid selected from the following options: Gly Tyr Cys Ala Arg
  MISC_FEATURE (14)..(14): Xaa at this position is a single (one, 1) amino acid selected from the following options: Val Ser Ala Thr Met Arg
  MISC_FEATURE (15)..(15): Xaa at this position is a single (one, 1) amino acid selected from the following options: Trp Leu
  MISC_FEATURE (16)..(16): Xaa at this position is a single (one, 1) amino acid selected from the following options: Gly Ser
  MISC_FEATURE (17)..(17): Xaa at this position is a single (one, 1) amino acid selected from the following options: Val Ala Met
  MISC_FEATURE (18)..(18): Xaa at this position is a single (one, 1) amino acid selected from the following options: Arg Trp Lys Leu
  MISC_FEATURE (19)..(19): Xaa at this position is a single (one, 1) amino acid selected from the following options: Thr Ala Val Ser
  MISC_FEATURE (20)..(20): Xaa at this position is a single (one, 1) amino acid selected from the following options: Met Leu Ile Arg Val Ala Thr
  MISC_FEATURE (21)..(21): Xaa at this position is a single (one, 1) amino acid selected from the following options: Gln Arg
  MISC_FEATURE (22)..(22): Xaa at this position is a single (one, 1) amino acid selected from the following options: Ala Thr Gly Ser
  MISC_FEATURE (23)..(23): Xaa at this position is a single (one, 1) amino acid selected from the following options: Arg Gln Gly Leu
  MISC_FEATURE (24)..(24): Xaa at this position is a single (one, 1) amino acid selected from the following options: Gly Ser
  MISC_FEATURE (25)..(25): Xaa at this position is a single (one, 1) amino acid selected from the following options: Phe Tyr
  MISC_FEATURE (26)..(26): Xaa at this position is a single (one, 1) amino acid selected from the following options: Gly Leu
  MISC_FEATURE (27)..(27): Xaa at this position is a single (one, 1) amino acid selected from the following options: Ser Gly
  MISC_FEATURE (28)..(28): Xaa at this position is a single (one, 1) amino acid selected from the following options: Glu Asp
  MISC_FEATURE (29)..(29): Xaa at this position is a single (one, 1) amino acid selected from the following options: Gly Ser
  MISC_FEATURE (30)..(30): Xaa at this position is a single (one, 1) amino acid selected from the following options: Ala Ser
  MISC_FEATURE (31)..(31): Xaa at this position is a single (one, 1) amino acid selected from the following options: Asp Gly
  MISC_FEATURE (32)..(32): Xaa at this position is a single (one, 1) amino acid selected from the following options: Asn Lys
  MISC_FEATURE (33)..(33): Xaa at this position is a single (one, 1) amino acid selected from the following options: Leu Gly
  MISC_FEATURE (34)..(34): Xaa at this position is a single (one, 1) amino acid selected from the following options: Gly Asp
  MISC_FEATURE (35)..(35): Xaa at this position is a single (one, 1) amino acid selected from the following options: Ser Gly
  MISC_FEATURE (36)..(36): Xaa at this position is a single (one, 1) amino acid selected from the following options: Ser Gly
  MISC_FEATURE (37)..(37): Xaa at this position is a single (one, 1) amino acid selected from the following options: Ala Gly
  MISC_FEATURE (38)..(38): Xaa at this position is a single (one, 1) amino acid selected from the following options: Gly Ala
  MISC_FEATURE (39)..(39): Xaa at this position is a single (one, 1) amino acid selected from the following options: Ser Thr Ala
  MISC_FEATURE (40)..(40): Xaa at this position is a single (one, 1) amino acid selected from the following options: Ile Val
  MISC_FEATURE (41)..(41): Xaa at this position is a single (one, 1) amino acid selected from the following options: Arg Trp
  MISC_FEATURE (42)..(42): Xaa at this position is a single (one, 1) amino acid selected from the following options: Asp Glu
  MISC_FEATURE (50)..(50): Xaa at this position is a single (one, 1) amino acid selected from the following options: Lys Arg
  MISC_FEATURE (51)..(51): Xaa at this position is a single (one, 1) amino acid selected from the following options: Glu Gln Ala
  MISC_FEATURE (52)..(52): Xaa at this position is a single (one, 1) amino acid selected from the following options: Gln Ala
  MISC_FEATURE (54)..(54): Xaa at this position is a single (one, 1) amino acid selected from the following options: Glu His
  MISC_FEATURE (59)..(59): Xaa at this position is a single (one, 1) amino acid selected from the following options: Phe Leu
  MISC_FEATURE (61)..(61): Xaa at this position is a single (one, 1) amino acid selected from the following options: Ala Glu
  MISC_FEATURE (62)..(62): Xaa at this position is a single (one, 1) amino acid selected from the following options: Arg Lys
  MISC_FEATURE (63)..(63): Xaa at this position is a single (one, 1) amino acid selected from the following options: Ala Glu
  MISC_FEATURE (64)..(64): Xaa at this position is a single (one, 1) amino acid selected from the following options: Lys Arg
  MISC_FEATURE (69)..(69): Xaa at this position is a single (one, 1) amino acid selected from the following options: Ala Ser
  MISC_FEATURE (71)..(71): Xaa at this position is a single (one, 1) amino acid selected from the following options: Lys Arg
  MISC_FEATURE (72)..(72): Xaa at this position is a single (one, 1) amino acid selected from the following options: Lys Glu
  MISC_FEATURE (73)..(73): Xaa at this position is a single (one, 1) amino acid selected from the following options: His Tyr Ala
  MISC_FEATURE (74)..(74): Xaa at this position is a single (one, 1) amino acid selected from the following options: His Lys Ala
  MISC_FEATURE (76)..(76): Xaa at this position is a single (one, 1) amino acid selected from the following options: Glu Asn
  MISC_FEATURE (79)..(79): Xaa at this position is a single (one, 1) amino acid selected from the following options: Ser Asp
  MISC_FEATURE (80)..(80): Xaa at this position is a single (one, 1) amino acid selected from the following options: His Ala
  MISC_FEATURE (81)..(81): Xaa at this position is a single (one, 1) amino acid selected from the following options: His Ala
  MISC_FEATURE (82)..(82): Xaa at this position is a single (one, 1) amino acid selected from the following options: Lys Val
  MISC_FEATURE (86)..(86): Xaa at this position is a single (one, 1) amino acid selected from the following options: Glu Gln
  MISC_FEATURE (87)..(87): Xaa at this position is a single (one, 1) amino acid selected from the following options: His Arg
  MISC_FEATURE (93)..(93): Xaa at this position is a single (one, 1) amino acid selected from the following options: Glu Asp
  MISC_FEATURE (97)..(97): Xaa at this position is a single (one, 1) amino acid selected from the following options: Gln Asn
  MISC_FEATURE (98)..(98): Xaa at this position is a single (one, 1) amino acid selected from the following options: Ser Lys
  MISC_FEATURE (104)..(104): Xaa at this position is a single (one, 1) amino acid selected from the following options: His Gly
  MISC_FEATURE (108)..(108): Asp or is absent (no amino acid at this position and so this position is not present)

SEQ ID NO: 53 - protein, 108 aa, Artificial Sequence; identical to SEQ ID NO: 36
  Designed; as detailed elsewhere in present application
  MISC_FEATURE (26)..(26): Xaa at this position is a single (one, 1) amino acid selected from the following options: Gly Leu
  MISC_FEATURE (27)..(27): Xaa at this position is a single (one, 1) amino acid selected from the following options: Ser Gly
  MISC_FEATURE (28)..(28): Xaa at this position is a single (one, 1) amino acid selected from the following options: Glu Asp
  MISC_FEATURE (29)..(29): Xaa at this position is a single (one, 1) amino acid selected from the following options: Gly Ser
  MISC_FEATURE (30)..(30): Xaa at this position is a single (one, 1) amino acid selected from the following options: Ala Ser
  MISC_FEATURE (31)..(31): Xaa at this position is a single (one, 1) amino acid selected from the following options: Asp Gly
  MISC_FEATURE (32)..(32): Xaa at this position is a single (one, 1) amino acid selected from the following options: Asn Lys
  MISC_FEATURE (33)..(33): Xaa at this position is a single (one, 1) amino acid selected from the following options: Leu Gly
  MISC_FEATURE (34)..(34): Xaa at this position is a single (one, 1) amino acid selected from the following options: Gly Asp
  MISC_FEATURE (35)..(35): Xaa at this position is a single (one, 1) amino acid selected from the following options: Ser Gly
  MISC_FEATURE (36)..(36): Xaa at this position is a single (one, 1) amino acid selected from the following options: Ser Gly
  MISC_FEATURE (37)..(37): Xaa at this position is a single (one, 1) amino acid selected from the following options: Ala Gly
  MISC_FEATURE (38)..(38): Xaa at this position is a single (one, 1) amino acid selected from the following options: Gly Ala
  MISC_FEATURE (39)..(39): Xaa at this position is a single (one, 1) amino acid selected from the following options: Ser Thr Ala
  MISC_FEATURE (40)..(40): Xaa at this position is a single (one, 1) amino acid selected from the following options: Ile Val
  MISC_FEATURE (41)..(41): Xaa at this position is a single (one, 1) amino acid selected from the following options: Arg Trp
  MISC_FEATURE (42)..(42): Xaa at this position is a single (one, 1) amino acid selected from the following options: Asp Glu
  MISC_FEATURE (50)..(50): Xaa at this position is a single (one, 1) amino acid selected from the following options: Lys Arg
  MISC_FEATURE (51)..(51): Xaa at this position is a single (one, 1) amino acid selected from the following options: Glu Gln Ala
  MISC_FEATURE (52)..(52): Xaa at this position is a single (one, 1) amino acid selected from the following options: Gln Ala
  MISC_FEATURE (54)..(54): Xaa at this position is a single (one, 1) amino acid selected from the following options: Glu His
  MISC_FEATURE (59)..(59): Xaa at this position is a single (one, 1) amino acid selected from the following options: Phe Leu
  MISC_FEATURE (61)..(61): Xaa at this position is a single (one, 1) amino acid selected from the following options: Ala Glu
  MISC_FEATURE (62)..(62): Xaa at this position is a single (one, 1) amino acid selected from the following options: Arg Lys
  MISC_FEATURE (63)..(63): Xaa at this position is a single (one, 1) amino acid selected from the following options: Ala Glu
  MISC_FEATURE (64)..(64): Xaa at this position is a single (one, 1) amino acid selected from the following options: Lys Arg
  MISC_FEATURE (69)..(69): Xaa at this position is a single (one, 1) amino acid selected from the following options: Ala Ser
  MISC_FEATURE (71)..(71): Xaa at this position is a single (one, 1) amino acid selected from the following options: Lys Arg
  MISC_FEATURE (72)..(72): Xaa at this position is a single (one, 1) amino acid selected from the following options: Lys Glu
  MISC_FEATURE (73)..(73): Xaa at this position is a single (one, 1) amino acid selected from the following options: His Tyr Ala
  MISC_FEATURE (74)..(74): Xaa at this position is a single (one, 1) amino acid selected from the following options: His Lys Ala
  MISC_FEATURE (76)..(76): Xaa at this position is a single (one, 1) amino acid selected from the following options: Glu Asn
  MISC_FEATURE (79)..(79): Xaa at this position is a single (one, 1) amino acid selected from the following options: Ser Asp
  MISC_FEATURE (80)..(80): Xaa at this position is a single (one, 1) amino acid selected from the following options: His Ala
  MISC_FEATURE (81)..(81): Xaa at this position is a single (one, 1) amino acid selected from the following options: His Ala
  MISC_FEATURE (82)..(82): Xaa at this position is a single (one, 1) amino acid selected from the following options: Lys Val
  MISC_FEATURE (86)..(86): Xaa at this position is a single (one, 1) amino acid selected from the following options: Glu Gln
  MISC_FEATURE (87)..(87): Xaa at this position is a single (one, 1) amino acid selected from the following options: His Arg
  MISC_FEATURE (93)..(93): Xaa at this position is a single (one, 1) amino acid selected from the following options: Glu Asp
  MISC_FEATURE (97)..(97): Xaa at this position is a single (one, 1) amino acid selected from the following options: Gln Asn
  MISC_FEATURE (98)..(98): Xaa at this position is a single (one, 1) amino acid selected from the following options: Ser Lys
  MISC_FEATURE (104)..(104): Xaa at this position is a single (one, 1) amino acid selected from the following options: His Gly
  MISC_FEATURE (108)..(108): Asp or is absent (no amino acid at this position and so this position is not present)

SEQ ID NO: 54 - protein, 108 aa, Artificial Sequence; identical to SEQ ID NO: 37
  Designed; as detailed elsewhere in present application
  MISC_FEATURE (26)..(26): Xaa at this position is a single (one, 1) amino acid selected from the following options: Gly Leu
  MISC_FEATURE (27)..(27): Xaa at this position is a single (one, 1) amino acid selected from the following options: Ser Gly
  MISC_FEATURE (28)..(28): Xaa at this position is a single (one, 1) amino acid selected from the following options: Glu Asp
  MISC_FEATURE (29)..(29): Xaa at this position is a single (one, 1) amino acid selected from the following options: Gly Ser
  MISC_FEATURE (30)..(30): Xaa at this position is a single (one, 1) amino acid selected from the following options: Ala Ser
  MISC_FEATURE (31)..(31): Xaa at this position is a single (one, 1) amino acid selected from the following options: Asp Gly
  MISC_FEATURE (32)..(32): Xaa at this position is a single (one, 1) amino acid selected from the following options: Asn Lys
  MISC_FEATURE (33)..(33): Xaa at this position is a single (one, 1) amino acid selected from the following options: Leu Gly
  MISC_FEATURE (34)..(34): Xaa at this position is a single (one, 1) amino acid selected from the following options: Gly Asp
  MISC_FEATURE (35)..(35): Xaa at this position is a single (one, 1) amino acid selected from the following options: Ser Gly
  MISC_FEATURE (36)..(36): Xaa at this position is a single (one, 1) amino acid selected from the following options: Ser Gly
  MISC_FEATURE (37)..(37): Xaa at this position is a single (one, 1) amino acid selected from the following options: Ala Gly
  MISC_FEATURE (38)..(38): Xaa at this position is a single (one, 1) amino acid selected from the following options: Gly Ala
  MISC_FEATURE (39)..(39): Xaa at this position is a single (one, 1) amino acid selected from the following options: Ser Thr Ala
  MISC_FEATURE (40)..(40): Xaa at this position is a single (one, 1) amino acid selected from the following options: Ile Val
  MISC_FEATURE (41)..(41): Xaa at this position is a single (one, 1) amino acid selected from the following options: Arg Trp
  MISC_FEATURE (42)..(42): Xaa at this position is a single (one, 1) amino acid selected from the following options: Asp Glu
  MISC_FEATURE (50)..(50): Xaa at this position is a single (one, 1) amino acid selected from the following options: Lys Arg
  MISC_FEATURE (51)..(51): Xaa at this position is a single (one, 1) amino acid selected from the following options: Glu Gln Ala
  MISC_FEATURE (52)..(52): Xaa at this position is a single (one, 1) amino acid selected from the following options: Gln Ala
  MISC_FEATURE (54)..(54): Xaa at this position is a single (one, 1) amino acid selected from the following options: Glu His
  MISC_FEATURE (59)..(59): Xaa at this position is a single (one, 1) amino acid selected from the following options: Phe Leu
  MISC_FEATURE (61)..(61): Xaa at this position is a single (one, 1) amino acid selected from the following options: Ala Glu
  MISC_FEATURE (62)..(62): Xaa at this position is a single (one, 1) amino acid selected from the following options: Arg Lys
  MISC_FEATURE (63)..(63): Xaa at this position is a single (one, 1) amino acid selected from the following options: Ala Glu
  MISC_FEATURE (64)..(64): Xaa at this position is a single (one, 1) amino acid selected from the following options: Lys Arg
  MISC_FEATURE (69)..(69): Xaa at this position is a single (one, 1) amino acid selected from the following options: Ala Ser
  MISC_FEATURE (71)..(71): Xaa at this position is a single (one, 1) amino acid selected from the following options: Lys Arg
  MISC_FEATURE (72)..(72): Xaa at this position is a single (one, 1) amino acid selected from the following options: Lys Glu
  MISC_FEATURE (73)..(73): Xaa at this position is a single (one, 1) amino acid selected from the following options: His Tyr Ala
  MISC_FEATURE (74)..(74): Xaa at this position is a single (one, 1) amino acid selected from the following options: His Lys Ala
  MISC_FEATURE (76)..(76): Xaa at this position is a single (one, 1) amino acid selected from the following options: Glu Asn
  MISC_FEATURE (79)..(79): Xaa at this position is a single (one, 1) amino acid selected from the following options: Ser Asp
  MISC_FEATURE (80)..(80): Xaa at this position is a single (one, 1) amino acid selected from the following options: His Ala
  MISC_FEATURE (81)..(81): Xaa at this position is a single (one, 1) amino acid selected from the following options: His Ala
  MISC_FEATURE (82)..(82): Xaa at this position is a single (one, 1) amino acid selected from the following options: Lys Val
  MISC_FEATURE (86)..(86): Xaa at this position is a single (one, 1) amino acid selected from the following options: Glu Gln
  MISC_FEATURE (87)..(87): Xaa at this position is a single (one, 1) amino acid selected from the following options: His Arg
  MISC_FEATURE (93)..(93): Xaa at this position is a single (one, 1) amino acid selected from the following options: Glu Asp
  MISC_FEATURE (97)..(97): Xaa at this position is a single (one, 1) amino acid selected from the following options: Gln Asn
  MISC_FEATURE (98)..(98): Xaa at this position is a single (one, 1) amino acid selected from the following options: Ser Lys
  MISC_FEATURE (104)..(104): Xaa at this position is a single (one, 1) amino acid selected from the following options: His Gly
  MISC_FEATURE (108)..(108): Asp or is absent (no amino acid at this position and so this position is not present)

SEQ ID NO: 55 - protein, 115 aa, Artificial Sequence; identical to SEQ ID NO: 38
  Designed; as detailed elsewhere in present application
  MISC_FEATURE (3)..(3): Xaa at this position is a single (one, 1) amino acid selected from the following options: Val Gly Ala Thr
  MISC_FEATURE (4)..(4): Xaa at this position is a single (one, 1) amino acid selected from the following options: Thr Ser Pro
  MISC_FEATURE (5)..(5): Xaa at this position is a single (one, 1) amino acid selected from the following options: Glu Ala Val
  MISC_FEATURE (6)..(6): Xaa at this position is a single (one, 1) amino acid selected from the following options: Leu Thr Gln
  MISC_FEATURE (7)..(7): Xaa at this position is a single (one, 1) amino acid selected from the following options: Ala Val
  MISC_FEATURE (8)..(8): Xaa at this position is a single (one, 1) amino acid selected from the following options: Ala Val Leu Ile Thr
  MISC_FEATURE (9)..(9): Xaa at this position is a single (one, 1) amino acid selected from the following options: Trp Arg Gln
  MISC_FEATURE (10)..(10): Xaa at this position is a single (one, 1) amino acid selected from the following options: Thr Val Met Ala Ser Leu
  MISC_FEATURE (11)..(11): Xaa at this position is a single (one, 1) amino acid selected from the following options: Gln Trp Arg
  MISC_FEATURE (12)..(12): Xaa at this position is a single (one, 1) amino acid selected from the following options: Leu Phe Gln
  MISC_FEATURE (13)..(13): Xaa at this position is a single (one, 1) amino acid selected from the following options: Arg Gly Tyr Cys Ala
  MISC_FEATURE (14)..(14): Xaa at this position is a single (one, 1) amino acid selected from the following options: Val Ser Ala Thr Met Arg
  MISC_FEATURE (15)..(15): Xaa at this position is a single (one, 1) amino acid selected from the following options: Trp Leu
  MISC_FEATURE (16)..(16): Xaa at this position is a single (one, 1) amino acid selected from the following options: Gly Ser
  MISC_FEATURE (17)..(17): Xaa at this position is a single (one, 1) amino acid selected from the following options: Val Ala Met
  MISC_FEATURE (18)..(18): Xaa at this position is a single (one, 1) amino acid selected from the following options: Arg Trp Lys Leu
  MISC_FEATURE (19)..(19): Xaa at this position is a single (one, 1) amino acid selected from the following options: Thr Ala Val Ser
  MISC_FEATURE (20)..(20): Xaa at this position is a single (one, 1) amino acid selected from the following options: Met Leu Ile Arg Val Ala Thr
  MISC_FEATURE (21)..(21): Xaa at this position is a single (one, 1) amino acid selected from the following options: Gln Arg
  MISC_FEATURE (22)..(22): Xaa at this position is a single (one, 1) amino acid selected from the following options: Ala Thr Gly Ser
  MISC_FEATURE (23)..(23): Xaa at this position is a single (one, 1) amino acid selected from the following options: Leu Arg Gln Gly
  MISC_FEATURE (24)..(24): Xaa at this position is a single (one, 1) amino acid selected from the following options: Gly Ser
  MISC_FEATURE (25)..(25): Xaa at this position is a single (one, 1) amino acid selected from the following options: Phe Tyr
  MISC_FEATURE (26)..(26): Xaa at this position is a single (one, 1) amino acid selected from the following options: Gly Ser Val Ala Thr Leu Arg Phe Ile Lys Met Gln Asn
  MISC_FEATURE (27)..(27): Xaa at this position is a single (one, 1) amino acid selected from the following options: Ser Cys Arg Gly Phe Thr Pro
  MISC_FEATURE (28)..(28): Xaa at this position is a single (one, 1) amino acid selected from the following options: Asp Glu Gly Ser Phe Lys Thr Leu Phe Pro
  MISC_FEATURE (29)..(29): Xaa at this position is a single (one, 1) amino acid selected from the following options: Pro Gln Arg Ser Thr Lys Gly Glu Ala Phe
  MISC_FEATURE (30)..(30): Xaa at this position is a single (one, 1) amino acid selected from the following options: Ser Pro Ala Gly Arg Glu Asp Val
  MISC_FEATURE (31)..(31): Xaa at this position is a single (one, 1) amino acid selected from the following options: Glu Asp Lys His Ala Gly Asn Ser Arg Gln Asp Thr Leu Val
  MISC_FEATURE (32)..(32): Xaa at this position is a single (one, 1) amino acid selected from the following options: Asn Asp Tyr Ser Gly Arg His Lys Glu Ala Leu
  MISC_FEATURE (33)..(33): Xaa at this position is a single (one, 1) amino acid selected from the following options: Val Leu Pro His Met Ile Phe Thr Gly Gly Ser Asp Glu Phe
  MISC_FEATURE (34)..(34): Xaa at this position is a single (one, 1) amino acid selected from the following options: Asp Gly His Arg Ser Glu Pro
  MISC_FEATURE (35)..(35): Xaa at this position is a single (one, 1) amino acid selected from the following options: Arg Ser Gly Thr Pro Ala Lys Glu
  MISC_FEATURE (36)..(36): Xaa at this position is a single (one, 1) amino acid selected from the following options: Arg Thr Gly Ser Arg Pro Lys Asp Ala
  MISC_FEATURE (37)..(37): Xaa at this position is a single (one, 1) amino acid selected from the following options: Ala Glu Ser Gly Arg
  MISC_FEATURE (38)..(38): Xaa at this position is a single (one, 1) amino acid selected from the following options: Ala Gly Gln Pro
  MISC_FEATURE (39)..(39): Xaa at this position is a single (one, 1) amino acid selected from the following options: Ser Thr Ala
  MISC_FEATURE (40)..(40): Xaa at this position is a single (one, 1) amino acid selected from the following options: Ile Val Leu Glu Phe
  MISC_FEATURE (41)..(41): Xaa at this position is a single (one, 1) amino acid selected from the following options: Trp Arg Lys Glu Thr Tyr
  MISC_FEATURE (42)..(42): Xaa at this position is a single (one, 1) amino acid selected from the following options: Asn Glu Asp Ala Lys Ser
  MISC_FEATURE (43)..(43): Xaa at this position is a single (one, 1) amino acid selected from the following options: Ala Arg Lys Cys
  MISC_FEATURE (44)..(44): Xaa at this position is a single (one, 1) amino acid selected from the following options: Gly Tyr Glu Pro
  MISC_FEATURE (45)..(45): Xaa at this position is a single (one, 1) amino acid selected from the following options: Val Gly Phe Lys Arg
  MISC_FEATURE (46)..(46): Xaa at this position is a single (one, 1) amino acid selected from the following options: Asp Ala Ser Arg Leu
  MISC_FEATURE (47)..(47): Xaa at this position is a single (one, 1) amino acid selected from the following options: Phe Leu Ile Glu Ser
  MISC_FEATURE (48)..(48): Xaa at this position is a single (one, 1) amino acid selected from the following options: Arg Gly Ala Ile Glu Ser Pro
  MISC_FEATURE (49)..(49): Xaa at this position is a single (one, 1) amino acid selected from the following options: Lys Arg Thr Glu Gln
  MISC_FEATURE (50)..(50): Xaa at this position is a single (one, 1) amino acid selected from the following options: Arg Lys Met
  MISC_FEATURE (51)..(51): Xaa at this position is a single (one, 1) amino acid selected from the following options: Glu Gln Ala
  MISC_FEATURE (52)..(52): Xaa at this position is a single (one, 1) amino acid selected from the following options: Gln Ala Lys Arg Pro Phe Val
  MISC_FEATURE (53)..(53): Xaa at this position is a single (one, 1) amino acid selected from the following options: Ala Ser Arg
  MISC_FEATURE (54)..(54): Xaa at this position is a single (one, 1) amino acid selected from the following options: Lys Glu Asp His Ala Ile
  MISC_FEATURE (55)..(55): Xaa at this position is a single (one, 1) amino acid selected from the following options: Gly Glu Pro Arg
  MISC_FEATURE (56)..(56): Xaa at this position is a single (one, 1) amino acid selected from the following options: Glu Asp Tyr Thr Gln
  MISC_FEATURE (57)..(57): Xaa at this position is a single (one, 1) amino acid selected from the following options: Arg Met Lys
  MISC_FEATURE (58)..(58): Xaa at this position is a single (one, 1) amino acid selected from the following options: Tyr Phe Glu
  MISC_FEATURE (59)..(59): Xaa at this position is a single (one, 1) amino acid selected from the following options: Leu Phe Pro Gln
  MISC_FEATURE (60)..(60): Xaa at this position is a single (one, 1) amino acid selected from the following options: Arg Leu Lys
  MISC_FEATURE (61)..(61): Xaa at this position is a single (one, 1) amino acid selected from the following options: Ala Lys Glu Thr Asp Gln Arg
  MISC_FEATURE (62)..(62): Xaa at this position is a single (one, 1) amino acid selected from the following options: Gln Arg Lys Ala Cys
  MISC_FEATURE (63)..(63): Xaa at this position is a single (one, 1) amino acid selected from the following options: Ser Thr Ala Asn Glu Leu
  MISC_FEATURE (64)..(64): Xaa at this position is a single (one, 1) amino acid selected from the following options: Arg Lys Gln His Ala
  MISC_FEATURE (65)..(65): Xaa at this position is a single (one, 1) amino acid selected from the following options: Glu Gln Lys
  MISC_FEATURE (66)..(66): Xaa at this position is a single (one, 1) amino acid selected from the following options: Gln Lys
  MISC_FEATURE (67)..(67): Xaa at this position is a single (one, 1) amino acid selected from the following options: Leu His Met Glu
  MISC_FEATURE (68)..(68): Xaa at this position is a single (one, 1) amino acid selected from the following options: Ala Leu Glu Thr Asp Ser
  MISC_FEATURE (69)..(69): Xaa at this position is a single (one, 1) amino acid selected from the following options: Ala Thr Arg Ile Ser Asn Val Met Asp
  MISC_FEATURE (70)..(70): Xaa at this position is a single (one, 1) amino acid selected from the following options: Leu Glu
  MISC_FEATURE (71)..(71): Xaa at this position is a single (one, 1) amino acid selected from the following options: Lys Arg Ile
  MISC_FEATURE (72)..(72): Xaa at this position is a single (one, 1) amino acid selected from the following options: Lys Asn Arg Thr Glu
  MISC_FEATURE (73)..(73): Xaa at this position is a single (one, 1) amino acid selected from the following options: His Tyr Ala
  MISC_FEATURE (74)..(74): Xaa at this position is a single (one, 1) amino acid selected from the following options: His Lys Ala
  MISC_FEATURE (75)..(75): Xaa at this position is a single (one, 1) amino acid selected from the following options: Glu Gln Lys Val
  MISC_FEATURE (76)..(76): Xaa at this position is a single (one, 1) amino acid selected from the following options: Glu Asp Asn Lys
  MISC_FEATURE (77)..(77): Xaa at this position is a single (one, 1) amino acid selected from the following options: Glu Val
  MISC_FEATURE (78)..(78): Xaa at this position is a single (one, 1) amino acid selected from the following options: Ile Val
  MISC_FEATURE (79)..(79): Xaa at this position is a single (one, 1) amino acid selected from the following options: Val Thr Ser Asp Asn Gly Ala Glu Gln Tyr Arg
  MISC_FEATURE (80)..(80): Xaa at this position is a single (one, 1) amino acid selected from the following options: His Ala
  MISC_FEATURE (81)..(81): Xaa at this position is a single (one, 1) amino acid selected from the following options: His Ala
  MISC_FEATURE (82)..(82): Xaa at this position is a single (one, 1) amino acid selected from the following options: Lys Ser Met Val His Ala Arg Gln Glu Ile Leu Val
  MISC_FEATURE (83)..(83): Xaa at this position is a single (one, 1) amino acid selected from the following options: Lys Glu Gln Arg Gly
  MISC_FEATURE (84)..(84): Xaa at this position is a single (one, 1) amino acid selected from the following options: Glu Ala Gln
  MISC_FEATURE (86)..(86): Xaa at this position is a single (one, 1) amino acid selected from the following options: Glu Lys Asp Gln
  MISC_FEATURE (87)..(87): Xaa at this position is a single (one, 1) amino acid selected from the following options: Arg His Leu Gln Cys Val Gln
  MISC_FEATURE (88)..(88): Xaa at this position is a single (one, 1) amino acid selected from the following options: Leu Met
  MISC_FEATURE (89)..(89): Xaa at this position is a single (one, 1) amino acid selected from the following options: Gln Glu Lys
  MISC_FEATURE (90)..(90): Xaa at this position is a single (one, 1) amino acid selected from the following options: Lys Asn Arg Gln
  MISC_FEATURE (91)..(91): Xaa at this position is a single (one, 1) amino acid selected from the following options: Glu Gln Asn
  MISC_FEATURE (92)..(92): Xaa at this position is a single (one, 1) amino acid selected from the following options: Ile Met
  MISC_FEATURE (93)..(93): Xaa at this position is a single (one, 1) amino acid selected from the following options: Glu Gln Asp Ile Lys
  MISC_FEATURE (94)..(94): Xaa at this position is a single (one, 1) amino acid selected from the following options: Arg Gln Lys Glu
  MISC_FEATURE (95)..(95): Xaa at this position is a single (one, 1) amino acid selected from the following options: His Leu Ile
  MISC_FEATURE (96)..(96): Xaa at this position is a single (one, 1) amino acid selected from the following options: Lys Gln Glu
  MISC_FEATURE (97)..(97): Xaa at this position is a single (one, 1) amino acid selected from the following options: Gln Lys Glu Tyr Gly Ser His Asp Asn
  MISC_FEATURE (98)..(98): Xaa at this position is a single (one, 1) amino acid selected from the following options: Lys Arg Ser Ala Asn Thr His Ser Leu
  MISC_FEATURE (99)..(99): Xaa at this position is a single (one, 1) amino acid selected from the following options: Ile Met Asp Val
  MISC_FEATURE (100)..(100): Xaa at this position is a single (one, 1) amino acid selected from the following options: Lys Gln Arg Asn
  MISC_FEATURE (101)..(101): Xaa at this position is a single (one, 1) amino acid selected from the following options: Met Thr Lys His Tyr Ser Gln Ile Val Asn Asp Arg
  MISC_FEATURE (103)..(103): Xaa at this position is a single (one, 1) amino acid selected from the following options: Lys Asn Ser His Arg Thr Gly
  MISC_FEATURE (104)..(104): Xaa at this position is a single (one, 1) amino acid selected from the following options: His Asp Asn Ser Arg Gln Glu Tyr Asn Leu Gln Gly
  MISC_FEATURE (105)..(105): Xaa at this position is a single (one, 1) amino acid selected from the following options: Asp His Ser Asn Ile or is absent (no amino acid at this position and so this position is not present)
  MISC_FEATURE (106)..(106): Xaa at this position is a single (one, 1) amino acid selected from the following options: Asp Glu His Gly Asn or is absent (no amino acid at this position and so this position is not present)
  MISC_FEATURE (107)..(107): Xaa at this position is a single (one, 1) amino acid selected from the following options: Asp His or is absent (no amino acid at this position and so this position is not present)
  MISC_FEATURE (108)..(108): Xaa at this position is a single (one, 1) amino acid selected from the following options: Asp Glu or is absent (no amino acid at this position and so this position is not present)
  MISC_FEATURE (109)..(109): Asp or is absent (no amino acid at this position and so this position is not present)
  MISC_FEATURE (110)..(110): Asp or is absent (no amino acid at this position and so this position is not present)
  MISC_FEATURE (111)..(111): Asp or is absent (no amino acid at this position and so this position is not present)
  MISC_FEATURE (112)..(112): Asp or is absent (no amino acid at this position and so this position is not present)
  MISC_FEATURE (113)..(113): Asp or is absent (no amino acid at this position and so this position is not present)
  MISC_FEATURE (114)..(114): Asp or is absent (no amino acid at this position and so this position is not present)
  MISC_FEATURE (115)..(115): Asp or is absent (no amino acid at this position and so this position is not present)

SEQ ID NO: 56 - protein, 109 aa, Artificial Sequence
  Designed; as detailed elsewhere in present application
  MISC_FEATURE (3)..(3): Xaa at this position is a single (one, 1) amino acid selected from the following options: Val Gly Ala Thr
  MISC_FEATURE (4)..(4): Xaa at this position is a single (one, 1) amino acid selected from the following options: Thr Ser Pro
  MISC_FEATURE (5)..(5): Xaa at this position is a single (one, 1) amino acid selected from the following options: Ala Val Glu
  MISC_FEATURE (6)..(6): Xaa at this position is a single (one, 1) amino acid selected from the following options: Leu Thr Gln
  MISC_FEATURE (7)..(7): Xaa at this position is a single (one, 1) amino acid selected from the following options: Ala Val
  MISC_FEATURE (8)..(8): Xaa at this position is a single (one, 1) amino acid selected from the following options: Ala Val Leu Ile Thr
  MISC_FEATURE (9)..(9): Xaa at this position is a single (one, 1) amino acid selected from the following options: Arg Gln Trp
  MISC_FEATURE (10)..(10): Xaa at this position is a single (one, 1) amino acid selected from the following options: Thr Val Met Ala Ser Leu
  MISC_FEATURE (11)..(11): Xaa at this position is a single (one, 1) amino acid selected from the following options: Trp Arg Gln
  MISC_FEATURE (12)..(12): Xaa at this position is a single (one, 1) amino acid selected from the following options: Leu Phe Gln
  MISC_FEATURE (13)..(13): Xaa at this position is a single (one, 1) amino acid selected from the following options: Gly Tyr Cys Ala Arg
  MISC_FEATURE (14)..(14): Xaa at this position is a single (one, 1) amino acid selected from the following options: Val Ser Ala Thr Met Arg
  MISC_FEATURE (15)..(15): Xaa at this position is a single (one, 1) amino acid selected from the following options: Trp Leu
  MISC_FEATURE (16)..(16): Xaa at this position is a single (one, 1) amino acid selected from the following options: Gly Ser
  MISC_FEATURE (17)..(17): Xaa at this position is a single (one, 1) amino acid selected from the following options: Val Ala Met
  MISC_FEATURE (18)..(18): Xaa at this position is a single (one, 1) amino acid selected from the following options: Arg Trp Lys Leu
  MISC_FEATURE (19)..(19): Xaa at this position is a single (one, 1) amino acid selected from the following options: Thr Ala Val Ser
  MISC_FEATURE (20)..(20): Xaa at this position is a single (one, 1) amino acid selected from the following options: Met Leu Ile Arg Val Ala Thr
  MISC_FEATURE (21)..(21): Xaa at this position is a single (one, 1) amino acid selected from the following options: Gln Arg
  MISC_FEATURE (22)..(22): Xaa at this position is a single (one, 1) amino acid selected from the following options: Ala Thr Gly Ser
  MISC_FEATURE (23)..(23): Xaa at this position is a single (one, 1) amino acid selected from the following options: Arg Gln Gly Leu
  MISC_FEATURE (24)..(24): Xaa at this position is a single (one, 1) amino acid selected from the following options: Gly Ser
  MISC_FEATURE (25)..(25): Xaa at this position is a single (one, 1) amino acid selected from the following options: Phe Tyr
  MISC_FEATURE (26)..(26): Xaa at this position is a single (one, 1) amino acid selected from the following options: Gly Ser Val Ala Thr
  MISC_FEATURE (27)..(27): Xaa at this position is a single (one, 1) amino acid selected from the following options: Ser Cys Arg
  MISC_FEATURE (28)..(28): Xaa at this position is a single (one, 1) amino acid selected from the following options: Asp Glu Gly Ser
  MISC_FEATURE (29)..(29): Xaa at this position is a single (one, 1) amino acid selected from the following options: Gln Arg Ser Thr Lys Pro
  MISC_FEATURE (30)..(30): Xaa at this position is a single (one, 1) amino acid selected from the following options: Ser Pro Ala Gly
  MISC_FEATURE (31)..(31): Xaa at this position is a single (one, 1) amino acid selected from the following options: Glu Asp Lys His Ala Gly Asn
  MISC_FEATURE (32)..(32): Xaa at this position is a single (one, 1) amino acid selected from the following options: Asn Asp Tyr Ser Gly Arg His
  MISC_FEATURE (33)..(33): Xaa at this position is a single (one, 1) amino acid selected from the following options: Val Leu Pro His Met Ile Phe Thr Gly
  MISC_FEATURE (34)..(34): Xaa at this position is a single (one, 1) amino acid selected from the following options: Asp Gly His Arg Ser Glu
  MISC_FEATURE (35)..(35): Xaa at this position is a single (one, 1) amino acid selected from the following options: Arg Ser Gly Thr Pro Ala
  MISC_FEATURE (36)..(36): Xaa at this position is a single (one, 1) amino acid selected from the following options: Gly Ser Arg Pro Lys Asp Arg Thr
  MISC_FEATURE (37)..(37): Xaa at this position is a single (one, 1) amino acid selected from the following options: Ala Glu Ser Glu
  MISC_FEATURE (38)..(38): Xaa at this position is a single (one, 1) amino acid selected from the following options: Gly Ala
  MISC_FEATURE (39)..(39): Xaa at this position is a single (one, 1) amino acid selected from the following options: Gly Pro Ala Val Leu Ile Met Cys Phe Tyr Trp His Lys Arg Gln Asn Glu Asp Ser Thr
  MISC_FEATURE (40)..(40): Xaa at this position is a single (one, 1) amino acid selected from the following options: Ile Val
  MISC_FEATURE (41)..(41): Xaa at this position is a single (one, 1) amino acid selected from the following options: Arg Lys Trp
  MISC_FEATURE (42)..(42): Xaa at this position is a single (one, 1) amino acid selected from the following options: Glu Asp Asn
  MISC_FEATURE (45)..(45): Xaa at this position is a single (one, 1) amino acid selected from the following options: Gly Val
  MISC_FEATURE (46)..(46): Xaa at this position is a single (one, 1) amino acid selected from the following options: Ala Ser Asp
  MISC_FEATURE (48)..(48): Xaa at this position is a single (one, 1) amino acid selected from the following options: Gly Ala Arg
  MISC_FEATURE (49)..(49): Xaa at this position is a single (one, 1) amino acid selected from the following options: Lys Arg
  MISC_FEATURE (50)..(50): Xaa at this position is a single (one, 1) amino acid selected from the following options: Arg Lys
  MISC_FEATURE (51)..(51): Xaa at this position is a single (one, 1) amino acid selected from the following options: Gly Pro Ala Val Leu Ile Met Cys Phe Tyr Trp His Lys Arg Gln Asn Glu Asp Ser Thr
  MISC_FEATURE (52)..(52): Xaa at this position is a single (one, 1) amino acid selected from the following options: Gln Ala Lys Arg
  MISC_FEATURE (53)..(53): Xaa at this position is a single (one, 1) amino acid selected from the following options: Ala Ser
  MISC_FEATURE (54)..(54): Xaa at this position is a single (one, 1) amino acid selected from the following options: Glu Asp Lys
  MISC_FEATURE (55)..(55): Xaa at this position is a single (one, 1) amino acid selected from the following options: Glu Gly
  MISC_FEATURE (56)..(56): Xaa at this position is a single (one, 1) amino acid selected from the following options: Glu Asp
  MISC_FEATURE (59)..(59): Xaa at this position is a single (one, 1) amino acid selected from the following options: Phe Leu
  MISC_FEATURE (60)..(60): Xaa at this position is a single (one, 1) amino acid selected from the following options: Arg Leu
  MISC_FEATURE (61)..(61): Xaa at this position is a single (one, 1) amino acid selected from the following options: Ala Lys Glu Thr
  MISC_FEATURE (62)..(62): Xaa at this position is a single (one, 1) amino acid selected from the following options: Gln Arg Lys
  MISC_FEATURE (63)..(63): Xaa at this position is a single (one, 1) amino acid selected from the following options: Ser Thr Ala Asn
  MISC_FEATURE (64)..(64): Xaa at this position is a single (one, 1) amino acid selected from the following options: Arg Lys
  MISC_FEATURE (65)..(65): Xaa at this position is a single (one, 1) amino acid selected from the following options: Glu Gln
  MISC_FEATURE (68)..(68): Xaa at this position is a single (one, 1) amino acid selected from the following options: Ala Leu Glu Thr
  MISC_FEATURE (69)..(69): Xaa at this position is a single (one, 1) amino acid selected from the following options: Ala Thr Arg Ile
  MISC_FEATURE (71)..(71): Xaa at this position is a single (one, 1) amino acid selected from the following options: Lys Arg
  MISC_FEATURE (73)..(73): Xaa at this position is a single (one, 1) amino acid selected from the following options: Gly Pro Ala Val Leu Ile Met Cys Phe Tyr Trp His Lys Arg Gln Asn Glu Asp Ser Thr
  MISC_FEATURE (76)..(76): Xaa at this position is a single (one, 1) amino acid selected from the following options: Glu Asp Asn
  MISC_FEATURE (78)..(78): Xaa at this position is a single (one, 1) amino acid selected from the following options: Ile Val
  MISC_FEATURE (79)..(79): Xaa at this position is a single (one, 1) amino acid selected from the following options: Val Thr Ser Asp Asn Gly Ala Glu Gln
  MISC_FEATURE (80)..(80): Xaa at this position is a single (one, 1) amino acid selected from the following options: Gly Pro Ala Val Leu Ile Met Cys Phe Tyr Trp His Lys Arg Gln Asn Glu Asp Ser Thr
  MISC_FEATURE (81)..(81): Xaa at this position is a single (one, 1) amino acid selected from the following options: Gly Pro Ala Val Leu Ile Met Cys Phe Tyr Trp His Lys Arg Gln Asn Glu Asp Ser Thr
  MISC_FEATURE (82)..(82): Xaa at this position is a single (one, 1) amino acid selected from the following options: Lys Ser Met Val His Ala Arg Gln Glu
  MISC_FEATURE (83)..(83): Xaa at this position is a single (one, 1) amino acid selected from the following options: Lys Glu Gln Arg
  MISC_FEATURE (86)..(86): Xaa at this position is a single (one, 1) amino acid selected from the following options: Glu Lys
  MISC_FEATURE (87)..(87): Xaa at this position is a single (one, 1) amino acid selected from the following options: Arg His
  MISC_FEATURE (90)..(90): Xaa at this position is a single (one, 1) amino acid selected from the following options: Lys Asn
  MISC_FEATURE (91)..(91): Xaa at this position is a single (one, 1) amino acid selected from the following options: Glu Gln
  MISC_FEATURE (93)..(93): Xaa at this position is a single (one, 1) amino acid selected from the following options: Glu Gln
  MISC_FEATURE (94)..(94): Xaa at this position is a single (one, 1) amino acid selected from the following options: Arg Gln
  MISC_FEATURE (96)..(96): Xaa at this position is a single (one, 1) amino acid selected from the following options: Lys Gln
  MISC_FEATURE (97)..(97): Xaa at this position is a single (one, 1) amino acid selected from the following options: Gln Lys Glu
  MISC_FEATURE (98)..(98): Xaa at this position is a single (one, 1) amino acid selected from the following options: Lys Arg Ser Ala Asn Thr
  MISC_FEATURE (99)..(99): Xaa at this position is a single (one, 1) amino acid selected from the following options: Ile Met
  MISC_FEATURE (100)..(100): Xaa at this position is a single (one, 1) amino acid selected from the following options: Lys Gln
  MISC_FEATURE (101)..(101): Xaa at this position is a single (one, 1) amino acid selected from the following options: Met Thr Lys His Tyr Ser Gln Ile Val Asn
  MISC_FEATURE (103)..(103): Xaa at this position is a single (one, 1) amino acid selected from the following options: Lys Asn Ser His
  MISC_FEATURE (104)..(104): Xaa at this position is a single (one, 1) amino acid selected from the following options: His Asp Asn Ser Arg Gln Glu Tyr
  MISC_FEATURE (105)..(105): Xaa at this position is a single (one, 1) amino acid selected from the following options: Asp His Ser Asn Ile
  MISC_FEATURE (106)..(106): Xaa at this position is a single (one, 1) amino acid selected from the following options: Asp Glu His Gly or is absent (no amino acid at this position and so this position is not present)
  MISC_FEATURE (107)..(107): Xaa at this position is a single (one, 1) amino acid selected from the following options: Asp His or is absent (no amino acid at this position and so this position is not present)
  MISC_FEATURE (108)..(108): Xaa at this position is a single (one, 1) amino acid selected from the following options: Asp or is absent (no amino acid at this position and so this position is not present)
  MISC_FEATURE (109)..(109): Xaa at this position is a single (one, 1) amino acid selected from the following options: Asp or is absent (no amino acid at this position and so this position is not present)
MAXXXXXXXXXXXXXXXXXXXXXXXXXXXXXXXXXXXXXXXXAGXXFXXXXXXXXXRYXXXXXXXQLXXLXKXKEXEXXXXXXEIXXLQXXIXXHXXXXXXLXXXXXXX

SEQ ID NO: 57 - protein, 109 aa, Artificial Sequence
  Designed; as detailed elsewhere in present application
  MISC_FEATURE (3)..(3): Xaa at this position is a single (one, 1) amino acid selected from the following options: Val Ala
  MISC_FEATURE (7)..(7): Xaa at this position is a single (one, 1) amino acid selected from the following options: Ala Val
  MISC_FEATURE (11)..(11): Xaa at this position is a single (one, 1) amino acid selected from the following options: Trp Arg
  MISC_FEATURE (12)..(12): Xaa at this position is a single (one, 1) amino acid selected from the following options: Leu Phe
  MISC_FEATURE (16)..(16): Xaa at this position is a single (one, 1) amino acid selected from the following options: Gly Ser
  MISC_FEATURE (18)..(18): Xaa at this position is a single (one, 1) amino acid selected from the following options: Arg Trp
  MISC_FEATURE (19)..(19): Xaa at this position is a single (one, 1) amino acid selected from the following options: Thr Ala
  MISC_FEATURE (22)..(22): Xaa at this position is a single (one, 1) amino acid selected from the following options: Ala Gly
  MISC_FEATURE (28)..(28): Xaa at this position is a single (one, 1) amino acid selected from the following options: Asp Glu
  MISC_FEATURE (29)..(29): Xaa at this position is a single (one, 1) amino acid selected from the following options: Gln Ser
  MISC_FEATURE (30)..(30): Xaa at this position is a single (one, 1) amino acid selected from the following options: Ser Ala
  MISC_FEATURE (31)..(31): Xaa at this position is a single (one, 1) amino acid selected from the following options: Glu Asp
  MISC_FEATURE (33)..(33): Xaa at this position is a single (one, 1) amino acid selected from the following options: Val Leu
  MISC_FEATURE (34)..(34): Xaa at this position is a single (one, 1) amino acid selected from the following options: Asp Gly
  MISC_FEATURE (35)..(35): Xaa at this position is a single (one, 1) amino acid selected from the following options: Arg Ser
  MISC_FEATURE (36)..(36): Xaa at this position is a single (one, 1) amino acid selected from the following options: Gly Ser
  MISC_FEATURE (39)..(39): Xaa at this position is a single (one, 1) amino acid selected from the following options: Gly Pro Ala Val Leu Ile Met Cys Phe Tyr Trp His Lys Arg Gln Asn Glu Asp Ser Thr
  MISC_FEATURE (40)..(40): Xaa at this position is a single (one, 1) amino acid selected from the following options: Ile Val
  MISC_FEATURE (42)..(42): Xaa at this position is a single (one, 1) amino acid selected from the following options: Glu Asp
  MISC_FEATURE (50)..(50): Xaa at this position is a single (one, 1) amino acid selected from the following options: Arg Lys
  MISC_FEATURE (51)..(51): Xaa at this position is a single (one, 1) amino acid selected from the following options: Gly Pro Ala Val Leu Ile Met Cys Phe Tyr Trp His Lys Arg Gln Asn Glu Asp Ser Thr
  MISC_FEATURE (54)..(54): Xaa at this position is a single (one, 1) amino acid selected from the following options: Glu Asp
  MISC_FEATURE (56)..(56): Xaa at this position is a single (one, 1) amino acid selected from the following options: Glu Asp
  MISC_FEATURE (62)..(62): Xaa at this position is a single (one, 1) amino acid selected from the following options: Gln Arg
  MISC_FEATURE (63)..(63): Xaa at this position is a single (one, 1) amino acid selected from the following options: Ser Thr Ala
  MISC_FEATURE (64)..(64): Xaa at this position is a single (one, 1) amino acid selected from the following options: Arg Lys
  MISC_FEATURE (71)..(71): Xaa at this position is a single (one, 1) amino acid selected from the following options: Lys Arg
  MISC_FEATURE (73)..(73): Xaa at this position is a single (one, 1) amino acid selected from the following options: Gly Pro Ala Val Leu Ile Met Cys Phe Tyr Trp His Lys Arg Gln Asn Glu Asp Ser Thr
  MISC_FEATURE (76)..(76): Xaa at this position is a single (one, 1) amino acid selected from the following options: Glu Asp Asn
  MISC_FEATURE (79)..(79): Xaa at this position is a single (one, 1) amino acid selected from the following options: Val Ser
  MISC_FEATURE (80)..(80): Xaa at this position is a single (one, 1) amino acid selected from the following options: Gly Pro Ala Val Leu Ile Met Cys Phe Tyr Trp His Lys Arg Gln Asn Glu Asp Ser Thr
  MISC_FEATURE (81)..(81): Xaa at this position is a single (one, 1) amino acid selected from the following options: Gly Pro Ala Val Leu Ile Met Cys Phe Tyr Trp His Lys Arg Gln Asn Glu Asp Ser Thr
  MISC_FEATURE (82)..(82): Xaa at this position is a single (one, 1) amino acid selected from the following options: Lys Val Met
  MISC_FEATURE (87)..(87): Xaa at this position is a single (one, 1) amino acid selected from the following options: Arg His
  MISC_FEATURE (91)..(91): Xaa at this position is a single (one, 1) amino acid selected from the following options: Glu Gln
  MISC_FEATURE (98)..(98): Xaa at this position is a single (one, 1) amino acid selected from the following options: Lys Ser
  MISC_FEATURE (101)..(101): Xaa at this position is a single (one, 1) amino acid selected from the following options: Met Thr Lys
  MISC_FEATURE (106)..(106): Asp or is absent (no amino acid at this position and so this position is not present)
  MISC_FEATURE (107)..(107): Asp or is absent (no amino acid at this position and so this position is not present)
  MISC_FEATURE (108)..(108): Asp or is absent (no amino acid at this position and so this position is not present)
  MISC_FEATURE (109)..(109): Asp or is absent (no amino acid at this position and so this position is not present)
MAXTALXARTXXGVWXVXXMQXRGFGSXXXXNXXXXAGXXRXAGGAFGKXXQAXEXRYFRAXXXEQLAALXKXKEXEIXXXXKEIEXLQKXIERHKQXIKXLKHDXXXX

SEQ ID NO: 58 - protein, 107 aa, Artificial Sequence
  Designed; as detailed elsewhere in present application
  misc_feature (3)..(3): Xaa at this position is a single (one, 1) amino acid selected from the following options: Ala Thr Val
  misc_feature (4)..(4): Xaa at this position is a single (one, 1) amino acid selected from the following options: Thr Ser
  misc_feature (5)..(5): Xaa at this position is a single (one, 1) amino acid selected from the following options: Ala Glu
  misc_feature (7)..(7): Xaa at this position is a single (one, 1) amino acid selected from the following options: Ala Val
  misc_feature (9)..(9): Xaa at this position is a single (one, 1) amino acid selected from the following options: Arg Trp
  misc_feature (10)..(10): Xaa at this position is a single (one, 1) amino acid selected from the following options: Thr Met
  misc_feature (11)..(11): Xaa at this position is a single (one, 1) amino acid selected from the following options: Arg Gln Trp
  misc_feature (12)..(12): Xaa at this position is a single (one, 1) amino acid selected from the following options: Phe Leu
  misc_feature (13)..(13): Xaa at this position is a single (one, 1) amino acid selected from the following options: Gly Arg Tyr Cys
  misc_feature (14)..(14): Xaa at this position is a single (one, 1) amino acid selected from the following options: Val Ser Ala Met
  misc_feature (15)..(15): Xaa at this position is a single (one, 1) amino acid selected from the following options: Trp Leu
  misc_feature (16)..(16): Xaa at this position is a single (one, 1) amino acid selected from the following options: Ser Gly
  misc_feature (17)..(17): Xaa at this position is a single (one, 1) amino acid selected from the following options: Val Ala
  misc_feature (18)..(18): Xaa at this position is a single (one, 1) amino acid selected from the following options: Trp Arg
  misc_feature (19)..(19): Xaa at this position is a single (one, 1) amino acid selected from the following options: Ala Thr Val
  misc_feature (20)..(20): Xaa at this position is a single (one, 1) amino acid selected from the following options: Met Val Arg
  misc_feature (22)..(22): Xaa at this position is a single (one, 1) amino acid selected from the following options: Gly Ala Thr
  misc_feature (23)..(23): Xaa at this position is a single (one, 1) amino acid selected from the following options: Arg Leu Gln
  misc_feature (24)..(24): Xaa at this position is a single (one, 1) amino acid selected from the following options: Gly Ser
  misc_feature (26)..(26): Xaa at this position is a single (one, 1) amino acid selected from the following options: Gly Ser
  misc_feature (28)..(28): Xaa at this position is a single (one, 1) amino acid selected from the following options: Glu Asp
  misc_feature (29)..(29): Xaa at this position is a single (one, 1) amino acid selected from the following options: Ser Gln Pro
  misc_feature (30)..(30): Xaa at this position is a single (one, 1) amino acid selected from the following options: Ala Ser Pro
  misc_feature (31)..(31): Xaa at this position is a single (one, 1) amino acid selected from the following options: Asp Glu His
  misc_feature (32)..(32): Xaa at this position is a single (one, 1) amino acid selected from the following options: Asn Asp
  misc_feature (33)..(33): Xaa at this position is a single (one, 1) amino acid selected from the following options: Leu Val
  misc_feature (34)..(34): Xaa at this position is a single (one, 1) amino acid selected from the following options: Gly Asp Arg
  misc_feature (35)..(35): Xaa at this position is a single (one, 1) amino acid selected from the following options: Ser Arg
  misc_feature (36)..(36): Xaa at this position is a single (one, 1) amino acid selected from the following options: Ser Gly Thr Arg
  misc_feature (37)..(37): Xaa at this position is a single (one, 1) amino acid selected from the following options: Ala Glu Ser
  misc_feature (38)..(38): Xaa at this position is a single (one, 1) amino acid selected from the following options: Gly Ala
  misc_feature (39)..(39): Xaa at this position is a single (one, 1) amino acid selected from the following options: Gly Pro Ala Val Leu Ile Met Cys Phe Tyr Trp His Lys Arg Gln Asn Glu Asp Ser Thr
  misc_feature (40)..(40): Xaa at this position is a single (one, 1) amino acid selected from the following options: Ile Val
  misc_feature (41)..(41): Xaa at this position is a single (one, 1) amino acid selected from the following options: Arg Trp
  misc_feature (42)..(42): Xaa at this position is a single (one, 1) amino acid selected from the following options: Asp Asn Glu
  misc_feature (45)..(45): Xaa at this position is a single (one, 1) amino acid selected from the following options: Gly Val
  misc_feature (46)..(46): Xaa at this position is a single (one, 1) amino acid selected from the following options: Ala Asp
  misc_feature (48)..(48): Xaa at this position is a single (one, 1) amino acid selected from the following options: Gly Arg Ala
  misc_feature (50)..(50): Xaa at this position is a single (one, 1) amino acid selected from the following options: Lys Arg
  misc_feature (51)..(51): Xaa at this position is a single (one, 1) amino acid selected from the following options: Gly Pro Ala Val Leu Ile Met Cys Phe Tyr Trp His Lys Arg Gln Asn Glu Asp Ser Thr
  misc_feature (52)..(52): Xaa at this position is a single (one, 1) amino acid selected from the following options: Gln Ala
  misc_feature (54)..(54): Xaa at this position is a single (one, 1) amino acid selected from the following options: Glu Lys
  misc_feature (55)..(55): Xaa at this position is a single (one, 1) amino acid selected from the following options: Glu Gly
  misc_feature (59)..(59): Xaa at this position is a single (one, 1) amino acid selected from the following options: Phe Leu
  misc_feature (62)..(62): Xaa at this position is a single (one, 1) amino acid selected from the following options: Arg Gln
  misc_feature (63)..(63): Xaa at this position is a single (one, 1) amino acid selected from the following options: Ala Ser Thr
  misc_feature (64)..(64): Xaa at this position is a single (one, 1) amino acid selected from the following options: Lys Arg
  misc_feature (68)..(68): Xaa at this position is a single (one, 1) amino acid selected from the following options: Ala Thr
  misc_feature (69)..(69): Xaa at this position is a single (one, 1) amino acid selected from the following options: Ala Thr
  misc_feature (73)..(73): Xaa at this position is a single (one, 1) amino acid selected from the following options: Gly Pro Ala Val Leu Ile Met Cys Phe Tyr Trp His Lys Arg Gln Asn Glu Asp Ser Thr
  misc_feature (76)..(76): Xaa at this position is a single (one, 1) amino acid selected from the following options: Asn Glu Asp
  misc_feature (79)..(79): Xaa at this position is a single (one, 1) amino acid selected from the following options: Ser Thr Gly Val
  misc_feature (80)..(80): Xaa at this position is a single (one, 1) amino acid selected from the following options: Gly Pro Ala Val Leu Ile Met Cys Phe Tyr Trp His Lys Arg Gln Asn Glu Asp Ser Thr
  misc_feature (81)..(81): Xaa at this position is a single (one, 1) amino acid selected from the following options: Gly Pro Ala Val Leu Ile Met Cys Phe Tyr Trp His Lys Arg Gln Asn Glu Asp Ser Thr
  misc_feature (82)..(82): Xaa at this position is a single (one, 1) amino acid selected from the following options: Val Met Lys Glu
  misc_feature (87)..(87): Xaa at this position is a single (one, 1) amino acid selected from the following options: His Arg
  misc_feature (90)..(90): Xaa at this position is a single (one, 1) amino acid selected from the following options: Lys Asn
  misc_feature (98)..(98): Xaa at this position is a single (one, 1) amino acid selected from the following options: Ser Lys
  misc_feature (101)..(101): Xaa at this position is a single (one, 1) amino acid selected from the following options: Lys Met Ile Thr
  misc_feature (104)..(104): Xaa at this position is a single (one, 1) amino acid selected from the following options: His Gln Arg Asp
  misc_feature (105)..(105): Xaa at this position is a single (one, 1) amino acid selected from the following options: Asp Asn
  misc_feature (107)..(107): Asp or is absent (no amino acid at this position and so this position is not present)
MAXXXLXAXXXXXXXXXXXXQXXXFXSXXXXXXXXXXXXXXXAGXXFXKXXXAXXERYXRAXXXEQLXXLKKXKEXEIXXXXKEIEXLQXEIERHKQXIKXLKXXDX

SEQ ID NO: 59 - protein, 107 aa, Artificial Sequence
  Designed; as detailed elsewhere in present application
  MISC_FEATURE (11)..(11): Xaa at this position is a single (one, 1) amino acid selected from the following options: Arg Trp
  MISC_FEATURE (12)..(12): Xaa at this position is a single (one, 1) amino acid selected from the following options: Phe Leu
  MISC_FEATURE (16)..(16): Xaa at this position is a single (one, 1) amino acid selected from the following options: Ser Gly
  MISC_FEATURE (18)..(18): Xaa at this position is a single (one, 1) amino acid selected from the following options: Trp Arg
  MISC_FEATURE (19)..(19): Xaa at this position is a single (one, 1) amino acid selected from the following options: Ala Thr
  MISC_FEATURE (22)..(22): Xaa at this position is a single (one, 1) amino acid selected from the following options: Gly Ala
  MISC_FEATURE (28)..(28): Xaa at this position is a single (one, 1) amino acid selected from the following options: Glu Asp
  MISC_FEATURE (29)..(29): Xaa at this position is a single (one, 1) amino acid selected from the following options: Ser Gln
  MISC_FEATURE (30)..(30): Xaa at this position is a single (one, 1) amino acid selected from the following options: Ala Ser
  MISC_FEATURE (31)..(31): Xaa at this position is a single (one, 1) amino acid selected from the following options: Asp Glu
  MISC_FEATURE (34)..(34): Xaa at this position is a single (one, 1) amino acid selected from the following options: Gly Asp
  MISC_FEATURE (35)..(35): Xaa at this position is a single (one, 1) amino acid selected from the following options: Ser Arg
  MISC_FEATURE (36)..(36): Xaa at this position is a single (one, 1) amino acid selected from the following options: Ser Gly
  MISC_FEATURE (39)..(39): Xaa at this position is a single (one, 1) amino acid selected from the following options: Gly Pro Ala Val Leu Ile Met Cys Phe Tyr Trp His Lys Arg Gln Asn Glu Asp Ser Thr
  MISC_FEATURE (40)..(40): Xaa at this position is a single (one, 1) amino acid selected from the following options: Ile Val
  MISC_FEATURE (42)..(42): Xaa at this position is a single (one, 1) amino acid selected from the following options: Asp Glu
  MISC_FEATURE (50)..(50): Xaa at this position is a single (one, 1) amino acid selected from the following options: Lys Arg
  MISC_FEATURE (51)..(51): Xaa at this position is a single (one, 1) amino acid selected from the following options: Gly Pro Ala Val Leu Ile Met Cys Phe Tyr Trp His Lys Arg Gln Asn Glu Asp Ser Thr
  MISC_FEATURE (62)..(62): Xaa at this position is a single (one, 1) amino acid selected from the following options: Arg Gln
  MISC_FEATURE (64)..(64): Xaa at this position is a single (one, 1) amino acid selected from the following options: Lys Arg
  MISC_FEATURE (73)..(73): Xaa at this position is a single (one, 1) amino acid selected from the following options: Gly Pro Ala Val Leu Ile Met Cys Phe Tyr Trp His Lys Arg Gln Asn Glu Asp Ser Thr
  MISC_FEATURE (76)..(76): Xaa at this position is a single (one, 1) amino acid selected from the following options: Asn Glu Asp
  MISC_FEATURE (79)..(79): Xaa at this position is a single (one, 1) amino acid selected from the following options: Ser Val
  MISC_FEATURE (80)..(80): Xaa at this position is a single (one, 1) amino acid selected from the following options: Gly Pro Ala Val Leu Ile Met Cys Phe Tyr Trp His Lys Arg Gln Asn Glu Asp Ser Thr
  MISC_FEATURE (81)..(81): Xaa at this position is a single (one, 1) amino acid selected from the following options: Gly Pro Ala Val Leu Ile Met Cys Phe Tyr Trp His Lys Arg Gln Asn Glu Asp Ser Thr
  MISC_FEATURE (82)..(82): Xaa at this position is a single (one, 1) amino acid selected from the following options: Val Met Lys
  MISC_FEATURE (87)..(87): Xaa at this position is a single (one, 1) amino acid selected from the following options: His Arg
  MISC_FEATURE (98)..(98): Xaa at this position is a single (one, 1) amino acid selected from the following options: Ser Lys
MAATALAARTXXGVWXVXXMQXRGFGSXXXXNLXXXAGXXRXAGGAFGKXXQAEEERYFRAXAXEQLAALKKXKEXEIXXXXKEIEXLQKEIERHKQXIKKLKHDDD

SEQ ID NO: 60 - protein, 108 aa, Artificial Sequence
  Designed; as detailed elsewhere in present application
  MISC_FEATURE (3)..(3): Xaa at this position is a single (one, 1) amino acid selected from the following options: Val Ala Thr
  MISC_FEATURE (4)..(4): Xaa at this position is a single (one, 1) amino acid selected from the following options: Thr Val
  MISC_FEATURE (5)..(5): Xaa at this position is a single (one, 1) amino acid selected from the following options: Ala Glu
  MISC_FEATURE (7)..(7): Xaa at this position is a single (one, 1) amino acid selected from the following options: Ala Val
  MISC_FEATURE (9)..(9): Xaa at this position is a single (one, 1) amino acid selected from the following options: Arg Trp
  MISC_FEATURE (10)..(10): Xaa at this position is a single (one, 1) amino acid selected from the following options: Thr Met Val
  MISC_FEATURE (11)..(11): Xaa at this position is a single (one, 1) amino acid selected from the following options: Arg Trp Gln
  MISC_FEATURE (12)..(12): Xaa at this position is a single (one, 1) amino acid selected from the following options: Leu Phe
  MISC_FEATURE (13)..(13): Xaa at this position is a single (one, 1) amino acid selected from the following options: Gly Arg Tyr Cys
  MISC_FEATURE (14)..(14): Xaa at this position is a single (one, 1) amino acid selected from the following options: Val Ser Ala
  MISC_FEATURE (15)..(15): Xaa at this position is a single (one, 1) amino acid selected from the following options: Trp Leu
  MISC_FEATURE (16)..(16): Xaa at this position is a single (one, 1) amino acid selected from the following options: Gly Ser
  MISC_FEATURE (17)..(17): Xaa at this position is a single (one, 1) amino acid selected from the following options: Val Ala
  MISC_FEATURE (18)..(18): Xaa at this position is a single (one, 1) amino acid selected from the following options: Trp Arg
  MISC_FEATURE (19)..(19): Xaa at this position is a single (one, 1) amino acid selected from the following options: Ala Thr Val
  MISC_FEATURE (20)..(20): Xaa at this position is a single (one, 1) amino acid selected from the following options: Met Val
  MISC_FEATURE (22)..(22): Xaa at this position is a single (one, 1) amino acid selected from the following options: Gly Ala
  MISC_FEATURE (23)..(23): Xaa at this position is a single (one, 1) amino acid selected from the following options: Arg Gln Leu
  MISC_FEATURE (24)..(24): Xaa at this position is a single (one, 1) amino acid selected from the following options: Gly Met
  MISC_FEATURE (25)..(25): Xaa at this position is a single (one, 1) amino acid selected from the following options: Phe Gln
  MISC_FEATURE (26)..(26): Xaa at this position is a single (one, 1) amino acid selected from the following options: Gly Ser
  MISC_FEATURE (28)..(28): Xaa at this position is a single (one, 1) amino acid selected from the following options: Glu Asp
  MISC_FEATURE (29)..(29): Xaa at this position is a single (one, 1) amino acid selected from the following options: Ser Pro Gln
  MISC_FEATURE (30)..(30): Xaa at this position is a single (one, 1) amino acid selected from the following options: Ala Ser Pro
  MISC_FEATURE (31)..(31): Xaa at this position is a single (one, 1) amino acid selected from the following options: Asp Glu His
  MISC_FEATURE (32)..(32): Xaa at this position is a single (one, 1) amino acid selected from the following options: Asn Asp
  MISC_FEATURE (33)..(33): Xaa at this position is a single (one, 1) amino acid selected from the following options: Leu Val
  MISC_FEATURE (34)..(34): Xaa at this position is a single (one, 1) amino acid selected from the following options: Gly Asp Arg
  MISC_FEATURE (35)..(35): Xaa at this position is a single (one, 1) amino acid selected from the following options: Ser Arg
  MISC_FEATURE (36)..(36): Xaa at this position is a single (one, 1) amino acid selected from the following options: Ser Gly Arg Thr
  MISC_FEATURE (37)..(37): Xaa at this position is a single (one, 1) amino acid selected from the following options: Ala Glu
  MISC_FEATURE (38)..(38): Xaa at this position is a single (one, 1) amino acid selected from the following options: Gly Ala
  MISC_FEATURE (39)..(39): Xaa at this position is a single (one, 1) amino acid selected from the following options: Gly Pro Ala Val Leu Ile Met Cys Phe Tyr Trp His Lys Arg Gln Asn Glu Asp Ser Thr
  MISC_FEATURE (40)..(40): Xaa at this position is a single (one, 1) amino acid selected from the following options: Val Ile
  MISC_FEATURE (41)..(41): Xaa at this position is a single (one, 1) amino acid selected from the following options: Arg Trp
  MISC_FEATURE (42)..(42): Xaa at this position is a single (one, 1) amino acid selected from the following options: Asp Glu Asn
  MISC_FEATURE (45)..(45): Xaa at this position is a single (one, 1) amino acid selected from the following options: Gly Val
  MISC_FEATURE (46)..(46): Xaa at this position is a single (one, 1) amino acid selected from the following options: Ala Asp
  MISC_FEATURE (48)..(48): Xaa at this position is a single (one, 1) amino acid selected from the following options: Gly Arg Ala
  MISC_FEATURE (50)..(50): Xaa at this position is a single (one, 1) amino acid selected from the following options: Arg Lys
  MISC_FEATURE (51)..(51): Xaa at this position is a single (one, 1) amino acid selected from the following options: Gly Pro Ala Val Leu Ile Met Cys Phe Tyr Trp His Lys Arg Gln Asn Glu Asp Ser Thr
  MISC_FEATURE (52)..(52): Xaa at this position is a single (one, 1) amino acid selected from the following options: Gln Ala
  MISC_FEATURE (54)..(54): Xaa at this position is a single (one, 1) amino acid selected from the following options: Glu Lys
  MISC_FEATURE (55)..(55): Xaa at this position is a single (one, 1) amino acid selected from the following options: Glu Gly
  MISC_FEATURE (56)..(56): Xaa at this position is a single (one, 1) amino acid selected from the following options: Glu Gln
  MISC_FEATURE (59)..(59): Xaa at this position is a single (one, 1) amino acid selected from the following options: Phe Leu
  MISC_FEATURE (62)..(62): Xaa at this position is a single (one, 1) amino acid selected from the following options: Arg Gln Cys
  MISC_FEATURE (63)..(63): Xaa at this position is a single (one, 1) amino acid selected from the following options: Ala Ser
  MISC_FEATURE (64)..(64): Xaa at this position is a single (one, 1) amino acid selected from the following options: Lys Arg
  MISC_FEATURE (69)..(69): Xaa at this position is a single (one, 1) amino acid selected from the following options: Ala Thr
  MISC_FEATURE (73)..(73): Xaa at this position is a single (one, 1) amino acid selected from the following options: Gly Pro Ala Val Leu Ile Met Cys Phe Tyr Trp His Lys Arg Gln Asn Glu Asp Ser Thr
  MISC_FEATURE (76)..(76): Xaa at this position is a single (one, 1) amino acid selected from the following options: Asn Glu
  MISC_FEATURE (79)..(79): Xaa at this position is a single (one, 1) amino acid selected from the following options: Ser Val Thr
  MISC_FEATURE (80)..(80): Xaa at this position is a single (one, 1) amino acid selected from the following options: Gly Pro Ala Val Leu Ile Met Cys Phe Tyr Trp His Lys Arg Gln Asn Glu Asp Ser Thr
  MISC_FEATURE (81)..(81): Xaa at this position is a single (one, 1) amino acid selected from the following options: Gly Pro Ala Val Leu Ile Met Cys Phe Tyr Trp His Lys Arg Gln Asn Glu Asp Ser Thr
  MISC_FEATURE (82)..(82): Xaa at this position is a single (one, 1) amino acid selected from the following options: Val Lys Met Glu
  MISC_FEATURE (87)..(87): Xaa at this position is a single (one, 1) amino acid selected from the following options: His Arg Cys
  MISC_FEATURE (90)..(90): Xaa at this position is a single (one, 1) amino acid selected from the following options: Lys Asn
  MISC_FEATURE (92)..(92): Xaa at this position is a single (one, 1) amino acid selected from the following options: Ile Met
  MISC_FEATURE (94)..(94): Xaa at this position is a single (one, 1) amino acid selected from the following options: Arg Glu
  MISC_FEATURE (98)..(98): Xaa at this position is a single (one, 1) amino acid selected from the following options: Ser Lys Leu
  MISC_FEATURE (99)..(99): Xaa at this position is a single (one, 1) amino acid selected from the following options: Ile Val
  MISC_FEATURE (101)..(101): Xaa at this position is a single (one, 1) amino acid selected from the following options: Lys Met
  MISC_FEATURE (104)..(104): Xaa at this position is a single (one, 1) amino acid selected from the following options: His Gln
  MISC_FEATURE (105)..(105): Xaa at this position is a single (one, 1) amino acid selected from the following options: Asp His
  MISC_FEATURE (107)..(107): Asp or is absent (no amino acid at this position and so this position is not present)
  MISC_FEATURE (108)..(108): Asp or is absent (no amino acid at this position and so this position is not present)
MAXXXLXAXXXXXXXXXXXXQXXXXXSXXXXXXXXXXXXXXXAGXXFXKXXXAXXXRYXRAXXXEQLAXLKKXKEXEIXXXXKEIEXLQXEXEXHKQXXKXLKXXDXX

SEQ ID NO: 61 - protein, 108 aa, Artificial Sequence
  Designed; as detailed elsewhere in present application
  MISC_FEATURE (16)..(16): Xaa at this position is a single (one, 1) amino acid selected from the following options: Gly Ser
  MISC_FEATURE (18)..(18): Xaa at this position is a single (one, 1) amino acid selected from the following options: Trp Arg
  MISC_FEATURE (19)..(19): Xaa at this position is a single (one, 1) amino acid selected from the following options: Ala Thr
  MISC_FEATURE (22)..(22): Xaa at this position is a single (one, 1) amino acid selected from the following options: Gly Ala
  MISC_FEATURE (23)..(23): Xaa at this position is a single (one, 1) amino acid selected from the following options: Arg Gln
  MISC_FEATURE (26)..(26): Xaa at this position is a single (one, 1) amino acid selected from the following options: Gly Ser
  MISC_FEATURE (28)..(28): Xaa at this position is a single (one, 1) amino acid selected from the following options: Glu Asp
  MISC_FEATURE (29)..(29): Xaa at this position is a single (one, 1) amino acid selected from the following options: Ser Gln
  MISC_FEATURE (30)..(30): Xaa at this position is a single (one, 1) amino acid selected from the following options: Ala Ser
  MISC_FEATURE (31)..(31): Xaa at this position is a single (one, 1) amino acid selected from the following options: Asp Glu
  MISC_FEATURE (32)..(32): Xaa at this position is a single (one, 1) amino acid selected from the following options: Asn Asp
  MISC_FEATURE (34)..(34): Xaa at this position is a single (one, 1) amino acid selected from the following options: Gly Asp
  MISC_FEATURE (35)..(35): Xaa at this position is a single (one, 1) amino acid selected from the following options: Ser Arg
  MISC_FEATURE (36)..(36): Xaa at this position is a single (one, 1) amino acid selected from the following options: Ser Gly
  MISC_FEATURE (39)..(39): Xaa at this position is a single (one, 1) amino acid selected from the following options: Gly Pro Ala Val Leu Ile Met Cys Phe Tyr Trp His Lys Arg Gln Asn Glu Asp Ser Thr
  MISC_FEATURE (40)..(40): Xaa at this position is a single (one, 1) amino acid selected from the following options: Val Ile
  MISC_FEATURE (41)..(41): Xaa at this position is a single (one, 1) amino acid selected from the following options: Arg Trp
  MISC_FEATURE (42)..(42): Xaa at this position is a single (one, 1) amino acid selected from the following options: Asp Glu
  MISC_FEATURE (45)..(45): Xaa at this position is a single (one, 1) amino acid selected from the following options: Gly Val
  MISC_FEATURE (46)..(46): Xaa at this position is a single (one, 1) amino acid selected from the following options: Ala Asp
  MISC_FEATURE (48)..(48): Xaa at this position is a single (one, 1) amino acid selected from the following options: Gly Ala
  MISC_FEATURE (50)..(50): Xaa at this position is a single (one, 1) amino acid selected from the following options: Arg Lys
  MISC_FEATURE (51)..(51): Xaa at this position is a single (one, 1) amino acid selected from the following options: Gly Pro Ala Val Leu Ile Met Cys Phe Tyr Trp His Lys Arg Gln Asn Glu Asp Ser Thr
  MISC_FEATURE (52)..(52): Xaa at this position is a single (one, 1) amino acid selected from the following options: Gln Ala
  MISC_FEATURE (54)..(54): Xaa at this position is a single (one, 1) amino acid selected from the following options: Glu Lys
  MISC_FEATURE (55)..(55): Xaa at this position is a single (one, 1) amino acid selected from the following options: Glu Gly
  MISC_FEATURE (56)..(56): Xaa at this position is a single (one, 1) amino acid selected from the following options: Glu Gln
  MISC_FEATURE (59)..(59): Xaa at this position is a single (one, 1) amino acid selected from the following options: Phe Leu
  MISC_FEATURE (62)..(62): Xaa at this position is a single (one, 1) amino acid selected from the following options: Arg Gln
  MISC_FEATURE (63)..(63): Xaa at this position is a single (one, 1) amino acid selected from the following options: Ala Ser
  MISC_FEATURE (64)..(64): Xaa at this position is a single (one, 1) amino acid selected from the following options: Lys Arg
  MISC_FEATURE (73)..(73): Xaa at this position is a single (one, 1) amino acid selected from the following options: Gly Pro Ala Val Leu Ile Met Cys Phe Tyr Trp His Lys Arg Gln Asn Glu Asp Ser Thr
  MISC_FEATURE (76)..(76): Xaa at this position is a single (one, 1) amino acid selected from the following options: Asn Glu
  MISC_FEATURE (79)..(79): Xaa at this position is a single (one, 1) amino acid selected from the following options: Ser Val
  MISC_FEATURE (80)..(80): Xaa at this position is a single (one, 1) amino acid selected from the following options: Gly Pro Ala Val Leu Ile Met Cys Phe Tyr Trp His Lys Arg Gln Asn Glu Asp Ser Thr
  MISC_FEATURE (81)..(81): Xaa at this position is a single (one, 1) amino acid selected from the following options: Gly Pro Ala Val Leu Ile Met Cys Phe Tyr Trp His Lys Arg Gln Asn Glu Asp Ser Thr
  MISC_FEATURE (82)..(82): Xaa at this position is a single (one, 1) amino acid selected from the following options: Val Lys
  MISC_FEATURE (87)..(87): Xaa at this position is a single (one, 1) amino acid selected from the following options: His Arg
  MISC_FEATURE (98)..(98): Xaa at this position is a single (one, 1) amino acid selected from the following options: Ser Lys
  MISC_FEATURE (101)..(101): Xaa at this position is a single (one, 1) amino acid selected from the following options: Lys Met
  MISC_FEATURE (108)..(108): Asp or is absent (no amino acid at this position and so this position is not present)
MAATALAARTRFGVWXVXXMQXXGFXSXXXXXLXXXAGXXXXAGXXFXKXXXAXXXRYXRAXXXEQLAALKKXKEXEIXXXXKEIEXLQKEIERHKQXIKXLKHDDDX

SEQ ID NO: 62 - protein, 107 aa, Artificial Sequence
  Designed; as detailed elsewhere in present application
  MISC_FEATURE (3)..(3): Xaa at this position is a single (one, 1) amino acid selected from the following options: Ala Val
  MISC_FEATURE (4)..(4): Xaa at this position is a single (one, 1) amino acid selected from the following options: Thr Val
  MISC_FEATURE (7)..(7): Xaa at this position is a single (one, 1) amino acid selected from the following options: Ala Val
  MISC_FEATURE (9)..(9): Xaa at this position is a single (one, 1) amino acid selected from the following options: Arg Trp
  MISC_FEATURE (10)..(10): Xaa at this position is a single (one, 1) amino acid selected from the following options: Thr Met
  MISC_FEATURE (11)..(11): Xaa at this position is a single (one, 1) amino acid selected from the following options: Arg Gln Trp
  MISC_FEATURE (12)..(12): Xaa at this position is a single (one, 1) amino acid selected from the following options: Phe Leu
  MISC_FEATURE (13)..(13): Xaa at this position is a single (one, 1) amino acid selected from the following options: Gly Arg
  MISC_FEATURE (16)..(16): Xaa at this position is a single (one, 1) amino acid selected from the following options: Gly Ser
  MISC_FEATURE (18)..(18): Xaa at this position is a single (one, 1) amino acid selected from the following options: Arg Trp
  MISC_FEATURE (19)..(19): Xaa at this position is a single (one, 1) amino acid selected from the following options: Thr Val Ala
  MISC_FEATURE (22)..(22): Xaa at this position is a single (one, 1) amino acid selected from the following options: Gly Ala
  MISC_FEATURE (23)..(23): Xaa at this position is a single (one, 1) amino acid selected from the following options: Arg Leu
  MISC_FEATURE (28)..(28): Xaa at this position is a single (one, 1) amino acid selected from the following options: Glu Asp
  MISC_FEATURE (29)..(29): Xaa at this position is a single (one, 1) amino acid selected from the following options: Ser Pro Gln
  MISC_FEATURE (30)..(30): Xaa at this position is a single (one, 1) amino acid selected from the following options: Ala Ser
  MISC_FEATURE (31)..(31): Xaa at this position is a single (one, 1) amino acid selected from the following options: Asp Glu
  MISC_FEATURE (33)..(33): Xaa at this position is a single (one, 1) amino acid selected from the following options: Leu Val
  MISC_FEATURE (34)..(34): Xaa at this position is a single (one, 1) amino acid selected from the following options: Gly Asp
  MISC_FEATURE (35)..(35): Xaa at this position is a single (one, 1) amino acid selected from the following options: Ser Arg
  MISC_FEATURE (36)..(36): Xaa at this position is a single (one, 1) amino acid selected from the following options: Ser Gly
  MISC_FEATURE (37)..(37): Xaa at this position is a single (one, 1) amino acid selected from the following options: Ala Glu
  MISC_FEATURE (38)..(38): Xaa at this position is a single (one, 1) amino acid selected from the following options: Gly Ala
  MISC_FEATURE (39)..(39): Xaa at this position is a single (one, 1) amino acid selected from the following options: Gly Pro Ala Val Leu Ile Met Cys Phe Tyr Trp His Lys Arg Gln Asn Glu Asp Ser Thr
  MISC_FEATURE (40)..(40): Xaa at this position is a single (one, 1) amino acid selected from the following options: Trp Val Ile
  MISC_FEATURE (41)..(41): Xaa at this position is a single (one, 1) amino acid selected from the following options: Arg Trp
  MISC_FEATURE (42)..(42): Xaa at this position is a single (one, 1) amino acid selected from the following options: Asn Glu Asp
  MISC_FEATURE (45)..(45): Xaa at this position is a single (one, 1) amino acid selected from the following options: Gly Val
  MISC_FEATURE (46)..(46): Xaa at this position is a single (one, 1) amino acid selected from the following options: Ala Asp
  MISC_FEATURE (48)..(48): Xaa at this position is a single (one, 1) amino acid selected from the following options: Gly Arg
  MISC_FEATURE (50)..(50): Xaa at this position is a single (one, 1) amino acid selected from the following options: Lys Arg
  MISC_FEATURE (51)..(51): Xaa at this position is a single (one, 1) amino acid selected from the following options: Gly Pro Ala Val Leu Ile Met Cys Phe Tyr Trp His Lys Arg Gln Asn Glu Asp Ser Thr
  MISC_FEATURE (54)..(54): Xaa at this position is a single (one, 1) amino acid selected from the following options: Glu Lys
  MISC_FEATURE (55)..(55): Xaa at this position is a single (one, 1) amino acid selected from the following options: Glu Gly
  MISC_FEATURE (59)..(59): Xaa at this position is a single (one, 1) amino acid selected from the following options: Phe Leu
  MISC_FEATURE (62)..(62): Xaa at this position is a single (one, 1) amino acid selected from the following options: Arg Gln
  MISC_FEATURE (63)..(63): Xaa at this position is a single (one, 1) amino acid selected from the following options: Ala Ser
  MISC_FEATURE (64)..(64): Xaa at this position is a single (one, 1) amino acid selected from the following options: Lys Arg
  MISC_FEATURE (73)..(73): Xaa at this position is a single (one, 1) amino acid selected from the following options: Gly Pro Ala Val Leu Ile Met Cys Phe Tyr Trp His Lys Arg Gln Asn Glu Asp Ser Thr
  MISC_FEATURE (76)..(76): Xaa at this position is a single (one, 1) amino acid selected from the following options: Asn Glu
  MISC_FEATURE (79)..(79): Xaa at this position is a single (one, 1) amino acid selected from the following options: Ser Val
  MISC_FEATURE (80)..(80): Xaa at this position is a single (one, 1) amino acid selected from the following options: Gly Pro Ala Val Leu Ile Met Cys Phe Tyr Trp His Lys Arg Gln Asn Glu Asp Ser Thr
  MISC_FEATURE (81)..(81): Xaa at this position is a single (one, 1) amino acid selected from the following options: Gly Pro Ala Val Leu Ile Met Cys Phe Tyr Trp His Lys Arg Gln Asn Glu Asp Ser Thr
  MISC_FEATURE (82)..(82): Xaa at this position is a single (one, 1) amino acid selected from the following options: Val Lys
  MISC_FEATURE (87)..(87): Xaa at this position is a single (one, 1) amino acid selected from the following options: Arg His
  MISC_FEATURE (98)..(98): Xaa at this position is a single (one, 1) amino acid selected from the following options: Lys Ser
  MISC_FEATURE (101)..(101): Xaa at this position is a single (one, 1) amino acid selected from the following options: Met Lys
  MISC_FEATURE (107)..(107): Asp or is absent (no amino acid at this position and so this position is not present)
MAXXALXAXXXXXVWXVXXMQXXGFGSXXXXNXXXXXXXXXXAGXXFXKXXQAXXERYXRAXXXEQLAALKKXKEXEIXXXXKEIEXLQKEIERHKQXIKXLKHDDX

SEQ ID NO: 63 - protein, 107 aa, Artificial Sequence
  Designed; as detailed elsewhere in present application
  MISC_FEATURE (39)..(39): Xaa at this position is a single (one, 1) amino acid selected from the following options: Gly Pro Ala Val Leu Ile Met Cys Phe Tyr Trp His Lys Arg Gln Asn Glu Asp Ser Thr
  MISC_FEATURE (51)..(51): Xaa at this position is a single (one, 1) amino acid selected from the following options: Gly Pro Ala Val Leu Ile Met Cys Phe Tyr Trp His Lys Arg Gln Asn Glu Asp Ser Thr
  MISC_FEATURE (73)..(73): Xaa at this position is a single (one, 1) amino acid selected from the following options: Gly Pro Ala Val Leu Ile Met Cys Phe Tyr Trp His Lys Arg Gln Asn Glu Asp Ser Thr
  MISC_FEATURE (80)..(80): Xaa at this position is a single (one, 1) amino acid selected from the following options: Gly Pro Ala Val Leu Ile Met Cys Phe Tyr Trp His Lys Arg Gln Asn Glu Asp Ser Thr
  MISC_FEATURE (81)..(81): Xaa at this position is a single (one, 1) amino acid selected from the following options: Gly Pro Ala Val Leu Ile Met Cys Phe Tyr Trp His Lys Arg Gln Asn Glu Asp Ser Thr
MAATALAARTRFGVWSVWAMQGRGFGSESADNLGSSAGXIRDAGGAFGKKXQAEEERYFRARAKEQLAALKKXKENEISXXVKEIEHLQKEIERHKQSIKKLKHDDD

SEQ ID NO: 64 - protein, 107 aa, Artificial Sequence
  Designed; as detailed elsewhere in present application
  MISC_FEATURE (3)..(3): Xaa at this position is a single (one, 1) amino acid selected from the following options: Val Gly Ala Thr
  MISC_FEATURE (4)..(4): Xaa at this position is a single (one, 1) amino acid selected from the following options: Thr Ser Pro
  MISC_FEATURE (5)..(5): Xaa at this position is a single (one, 1) amino acid selected from the following options: Ala Val Glu
  MISC_FEATURE (6)..(6): Xaa at this position is a single (one, 1) amino acid selected from the following options: Leu Thr Gln
  MISC_FEATURE (7)..(7): Xaa at this position is a single (one, 1) amino acid selected from the following options: Ala Val
  MISC_FEATURE (8)..(8): Xaa at this position is a single (one, 1) amino acid selected from the following options: Ala Val Leu Ile Thr
  MISC_FEATURE (9)..(9): Xaa at this position is a single (one, 1) amino acid selected from the following options: Arg Gln Trp
  MISC_FEATURE (10)..(10): Xaa at this position is a single (one, 1) amino acid selected from the following options: Thr Val Met Ala Ser Leu
  MISC_FEATURE (11)..(11): Xaa at this position is a single (one, 1) amino acid selected from the following options: Trp Arg Gln
  MISC_FEATURE (12)..(12): Xaa at this position is a single (one, 1) amino acid selected from the following options: Leu Phe Gln
  MISC_FEATURE (13)..(13): Xaa at this position is a single (one, 1) amino acid selected from the following options: Gly Tyr Cys Ala Arg
  MISC_FEATURE (14)..(14): Xaa at this position is a single (one, 1) amino acid selected from the following options: Val Ser Ala Thr Met Arg
  MISC_FEATURE (15)..(15): Xaa at this position is a single (one, 1) amino acid selected from the following options: Trp Leu
  MISC_FEATURE (16)..(16): Xaa at this position is a single (one, 1) amino acid selected from the following options: Gly Ser
  MISC_FEATURE (17)..(17): Xaa at this position is a single (one, 1) amino acid selected from the following options: Val Ala Met
  MISC_FEATURE (18)..(18): Xaa at this position is a single (one, 1) amino acid selected from the following options: Arg Trp Lys Leu
  MISC_FEATURE (19)..(19): Xaa at this position is a single (one, 1) amino acid selected from the following options: Thr Ala Val Ser
  MISC_FEATURE (20)..(20): Xaa at this position is a single (one, 1) amino acid selected from the following options: Met Leu Ile Arg Val Ala Thr
  MISC_FEATURE (21)..(21): Xaa at this position is a single (one, 1) amino acid selected from the following options: Gln Arg
  MISC_FEATURE (22)..(22): Xaa at this position is a single (one, 1) amino acid selected from the following options: Ala Thr Gly Ser
  MISC_FEATURE (23)..(23): Xaa at this position is a single (one, 1) amino acid selected from the following options: Arg Gln Gly Leu
  MISC_FEATURE (24)..(24): Xaa at this position is a single (one, 1) amino acid selected from the following options: Gly Ser
  MISC_FEATURE (25)..(25): Xaa at this position is a single (one, 1) amino acid selected from the following options: Phe Tyr
  MISC_FEATURE (39)..(39): Xaa at this position is a single (one, 1) amino acid selected from the following options: Gly Pro Ala Val Leu Ile Met Cys Phe Tyr Trp His Lys Arg Gln Asn Glu Asp Ser Thr
  MISC_FEATURE (51)..(51): Xaa at this position is a single (one, 1) amino acid selected from the following options: Gly Pro Ala Val Leu Ile Met Cys Phe Tyr Trp His Lys Arg Gln Asn Glu Asp Ser Thr
  MISC_FEATURE (73)..(73): Xaa at this position is a single (one, 1) amino acid selected from the following options: Gly Pro Ala Val Leu Ile Met Cys Phe Tyr Trp His Lys Arg Gln Asn Glu Asp Ser Thr
  MISC_FEATURE (80)..(80): Xaa at this position is a single (one, 1) amino acid selected from the following options: Gly Pro Ala Val Leu Ile Met Cys Phe Tyr Trp His Lys Arg Gln Asn Glu Asp Ser Thr
  MISC_FEATURE (81)..(81): Xaa at this position is a single (one, 1) amino acid selected from the following options: Gly Pro Ala Val Leu Ile Met Cys Phe Tyr Trp His Lys Arg Gln Asn Glu Asp Ser Thr
MAXXXXXXXXXXXXXXXXXXXXXXXGSESADNLGSSAGXIRDAGGAFGKKXQAEEERYFRARAKEQLAALKKXKENEISXXVKEIEHLQKEIERHKQSIKKLKHDDD

SEQ ID NO: 65 - protein, 107 aa, Artificial Sequence
  Designed; as detailed elsewhere in present application
  MISC_FEATURE (39)..(39): Xaa at this position is a single (one, 1) amino acid selected from the following options: Gly Pro Ala Val Leu Ile Met Cys Phe Tyr Trp His Lys Arg Gln Asn Glu Asp Ser Thr
  MISC_FEATURE (51)..(51): Xaa at this position is a single (one, 1) amino acid selected from the following options: Gly Pro Ala Val Leu Ile Met Cys Phe Tyr Trp His Lys Arg Gln Asn Glu Asp Ser Thr
  MISC_FEATURE (73)..(73): Xaa at this position is a single (one, 1) amino acid selected from the following options: Gly Pro Ala Val Leu Ile Met Cys Phe Tyr Trp His Lys Arg Gln Asn Glu Asp Ser Thr
  MISC_FEATURE (80)..(80): Xaa at this position is a single (one, 1) amino acid selected from the following options: Gly Pro Ala Val Leu Ile Met Cys Phe Tyr Trp His Lys Arg Gln Asn Glu Asp Ser Thr
  MISC_FEATURE (81)..(81): Xaa at this position is a single (one, 1) amino acid selected from the following options: Gly Pro Ala Val Leu Ile Met Cys Phe Tyr Trp His Lys Arg Gln Asn Glu Asp Ser Thr
MAVTALAARTWLGVWGVRTMQARGFGSESADNLGSSAGXIRDAGGAFGKKXQAEEERYFRARAKEQLAALKKXKENEISXXVKEIEHLQKEIERHKQSIKKLKHDDD

SEQ ID NO: 66 - protein, 107 aa, Artificial Sequence
  Designed; as detailed elsewhere in present application
  MISC_FEATURE (39)..(39): Xaa at this position is a single (one, 1) amino acid selected from the following options: Gly Pro Ala Val Leu Ile Met Cys Phe Tyr Trp His Lys Arg Gln Asn Glu Asp Ser Thr
  MISC_FEATURE (51)..(51): Xaa at this position is a single (one, 1) amino acid selected from the following options: Gly Pro Ala Val Leu Ile Met Cys Phe Tyr Trp His Lys Arg Gln Asn Glu Asp Ser Thr
  MISC_FEATURE (73)..(73): Xaa at this position is a single (one, 1) amino acid selected from the following options: Gly Pro Ala Val Leu Ile Met Cys Phe Tyr Trp His Lys Arg Gln Asn Glu Asp Ser Thr
  MISC_FEATURE (80)..(80): Xaa at this position is a single (one, 1) amino acid selected from the following options: Gly Pro Ala Val Leu Ile Met Cys Phe Tyr Trp His Lys Arg Gln Asn Glu Asp Ser Thr
  MISC_FEATURE (81)..(81): Xaa at this position is a single (one, 1) amino acid selected from the following options: Gly Pro Ala Val Leu Ile Met Cys Phe Tyr Trp His Lys Arg Gln Asn Glu Asp Ser Thr
MAGSALAVRARFGVWGMKVLQTRGFGSESADNLGSSAGXIRDAGGAFGKKXQAEEERYFRARAKEQLAALKKXKENEISXXVKEIEHLQKEIERHKQSIKKLKHDDD

SEQ ID NO: 67 - protein, 110 aa, Artificial Sequence
  Designed; as detailed elsewhere in present application
  MISC_FEATURE (3)..(3): Xaa at this position is a single (one, 1) amino acid selected from the following options: Val Gly Ala Thr
  MISC_FEATURE (4)..(4): Xaa at this position is a single (one, 1) amino acid selected from the following options: Thr Ser Pro
  MISC_FEATURE (5)..(5): Xaa at this position is a single (one, 1) amino acid selected from the following options: Glu Ala Val
  MISC_FEATURE (6)..(6): Xaa at this position is a single (one, 1) amino acid selected from the following options: Leu Thr Gln
  MISC_FEATURE (7)..(7): Xaa at this position is a single (one, 1) amino acid selected from the following options: Ala Val
  MISC_FEATURE (8)..(8): Xaa at this position is a single (one, 1) amino acid selected from the following options: Ala Val Leu Ile Thr
  MISC_FEATURE (9)..(9): Xaa at this position is a single (one, 1) amino acid selected from the following options: Trp Arg Gln
  MISC_FEATURE (10)..(10): Xaa at this position is a single (one, 1) amino acid selected from the following options: Thr Val Met Ala Ser Leu
  MISC_FEATURE (11)..(11): Xaa at this position is a single (one, 1) amino acid selected from the following options: Gln Trp Arg
  MISC_FEATURE (12)..(12): Xaa at this position is a single (one, 1) amino acid selected from the following options: Leu Phe Gln
  MISC_FEATURE (13)..(13): Xaa at this position is a single (one, 1) amino acid selected from the following options: Arg Gly Tyr Cys Ala
  MISC_FEATURE (14)..(14): Xaa at this position is a single (one, 1) amino acid selected from the following options: Val Ser Ala Thr Met Arg
  MISC_FEATURE (15)..(15): Xaa at this position is a single (one, 1) amino acid selected from the following options: Trp Leu
  MISC_FEATURE (16)..(16): Xaa at this position is a single (one, 1) amino acid selected from the following options: Gly Ser
  MISC_FEATURE (17)..(17): Xaa at this position is a single (one, 1) amino acid selected from the following options: Val Ala Met
  MISC_FEATURE (18)..(18): Xaa at this position is a single (one, 1) amino acid selected from the following options: Arg Trp Lys Leu
  MISC_FEATURE (19)..(19): Xaa at this position is a single (one, 1) amino acid selected from the following options: Thr Ala Val Ser
  MISC_FEATURE (20)..(20): Xaa at this position is a single (one, 1) amino acid selected from the following options: Met Leu Ile Arg Val Ala Thr
  MISC_FEATURE (21)..(21): Xaa at this position is a single (one, 1) amino acid selected from the following options: Gln Arg
  MISC_FEATURE (22)..(22): Xaa at this position is a single (one, 1) amino acid selected from the following options: Ala Thr Gly Ser
  MISC_FEATURE (23)..(23): Xaa at this position is a single (one, 1) amino acid selected from the following options: Leu Arg Gln Gly
  MISC_FEATURE (24)..(24): Xaa at this position is a single (one, 1) amino acid selected from the following options: Gly Ser
  MISC_FEATURE (25)..(25): Xaa at this position is a single (one, 1) amino acid selected from the following options: Phe Tyr
  MISC_FEATURE (26)..(26): Xaa at this position is a single (one, 1) amino acid selected from the following options: Gly Ser Val Ala Thr Leu Arg Phe Ile Lys Met Gln Asn
  MISC_FEATURE (27)..(27): Xaa at this position is a single (one, 1) amino acid selected from the following options: Ser Cys Arg Gly Phe Thr Pro
  MISC_FEATURE (28)..(28): Xaa at this position is a single (one, 1) amino acid selected from the following options: Asp Glu Gly Ser Phe Lys Thr Leu Phe Pro
  MISC_FEATURE (29)..(29): Xaa at this position is a single (one, 1) amino acid selected from the following options: Pro Gln Arg Ser Thr Lys Gly Glu Ala Phe
  MISC_FEATURE (30)..(30): Xaa at this position is a single (one, 1) amino acid selected from the following options: Ser Pro Ala Gly Arg Glu Asp Val
  MISC_FEATURE (31)..(31): Xaa at this position is a single (one, 1) amino acid selected from the following options: Glu Asp Lys His Ala Gly Asn Ser Arg Gln Asp Thr Leu Val
  MISC_FEATURE (32)..(32): Xaa at this position is a single (one, 1) amino acid selected from the following options: Asn Asp Tyr Ser Gly Arg His Lys Glu Ala Leu
  MISC_FEATURE (33)..(33): Xaa at this position is a single (one, 1) amino acid selected from the following options: Val Leu Pro His Met Ile Phe Thr Gly Gly Ser Asp Glu Phe
  MISC_FEATURE (34)..(34): Xaa at this position is a single (one, 1) amino acid selected from the following options: Asp Gly His Arg Ser Glu Pro
  MISC_FEATURE (35)..(35): Xaa at this position is a single (one, 1) amino acid selected from the following options: Arg Ser Gly Thr Pro Ala Lys Glu
  MISC_FEATURE (36)..(36): Xaa at this position is a single (one, 1) amino acid selected from the following options: Arg Thr Gly Ser Arg Pro Lys Asp Ala
  MISC_FEATURE (37)..(37): Xaa at this position is a single (one, 1) amino acid selected from the following options: Ala Glu Ser Gly Arg
  MISC_FEATURE (38)..(38): Xaa at this position is a single (one, 1) amino acid selected from the following options: Ala Gly Gln Pro
  MISC_FEATURE (39)..(39): Xaa at this position is a single (one, 1) amino acid selected from the following options: Gly Pro Ala Val Leu Ile Met Cys Phe Tyr Trp His Lys Arg Gln Asn Glu Asp Ser Thr
  MISC_FEATURE (40)..(40): Xaa at this position is a single (one, 1) amino acid selected from the following options: Ile Val Leu Glu Phe
  MISC_FEATURE (41)..(41): Xaa at this position is a single (one, 1) amino acid selected from the following options: Trp Arg Lys Glu Thr Tyr
  MISC_FEATURE (42)..(42): Xaa at this position is a single (one, 1) amino acid selected from the following options: Asn Glu Asp Ala Lys Ser
  MISC_FEATURE (43)..(43): Xaa at this position is a single (one, 1) amino acid selected from the following options: Ala Arg Lys Cys
  MISC_FEATURE (44)..(44): Xaa at this position is a single (one, 1) amino acid selected from the following options: Gly Tyr Glu Pro
  MISC_FEATURE (45)..(45): Xaa at this position is a single (one, 1) amino acid selected from the following options: Val Gly Phe Lys Arg
  MISC_FEATURE (46)..(46): Xaa at this position is a single (one, 1) amino acid selected from the following options: Asp Ala Ser Arg Leu
  MISC_FEATURE (47)..(47): Xaa at this position is a single (one, 1) amino acid selected from the following options: Phe Leu Ile Glu Ser
  MISC_FEATURE (48)..(48): Xaa at this position is a single (one, 1) amino acid selected from the following options: Arg Gly Ala Ile Glu Ser Pro
  MISC_FEATURE (49)..(49): Xaa at this position is a single (one, 1) amino acid selected from the following options: Lys Arg Thr Glu Gln
  MISC_FEATURE (50)..(50): Xaa at this position is a single (one, 1) amino acid selected from the following options: Arg Lys Met
  MISC_FEATURE (51)..(51): Xaa at this position is a single (one, 1) amino acid selected from the following options: Gly Pro Ala Val Leu Ile Met Cys Phe Tyr Trp His Lys Arg Gln Asn Glu Asp Ser Thr
  MISC_FEATURE (52)..(52): Xaa at this position is a single (one, 1) amino acid selected from the following options: Gln Ala Lys Arg Pro Phe Val
  MISC_FEATURE (53)..(53): Xaa at this position is a single (one, 1) amino acid selected from the following options: Ala Ser Arg
  MISC_FEATURE (54)..(54): Xaa at this position is a single (one, 1) amino acid selected from the following options: Lys Glu Asp His Ala Ile
  MISC_FEATURE (55)..(55): Xaa at this position is a single (one, 1) amino acid selected from the following options: Gly Glu Pro Arg
  MISC_FEATURE (56)..(56): Xaa at this position is a single (one, 1) amino acid selected from the following options: Glu Asp Tyr Thr Gln
  MISC_FEATURE (57)..(57): Xaa at this position is a single (one, 1) amino acid selected from the following options: Arg Met Lys
  MISC_FEATURE (58)..(58): Xaa at this position is a single (one, 1) amino acid selected from the following options: Tyr Phe Glu
  MISC_FEATURE (59)..(59): Xaa at this position is a single (one, 1) amino acid selected from the following options: Leu Phe Pro Gln
  MISC_FEATURE (60)..(60): Xaa at this position is a single (one, 1) amino acid selected from the following options: Arg Leu Lys
  MISC_FEATURE (61)..(61): Xaa at this position is a single (one, 1) amino acid selected from the following options: Ala Lys Glu Thr Asp Gln Arg
  MISC_FEATURE (62)..(62): Xaa at this position is a single (one, 1) amino acid selected from the following options: Gln Arg Lys Ala Cys
  MISC_FEATURE (63)..(63): Xaa at this position is a single (one, 1) amino acid selected from the following options: Ser Thr Ala Asn Glu Leu
  MISC_FEATURE (64)..(64): Xaa at this position is a single (one, 1) amino acid selected from the following options: Arg Lys Gln His Ala
  MISC_FEATURE (65)..(65): Xaa at this position is a single (one, 1) amino acid selected from the following options: Glu Gln Lys
  MISC_FEATURE (66)..(66): Xaa at this position is a single (one, 1) amino acid selected from the following options: Gln Lys
  MISC_FEATURE (67)..(67): Xaa at this position is a single (one, 1) amino acid selected from the following options: Leu His Met Glu
  MISC_FEATURE (68)..(68): Xaa at this position is a single (one, 1) amino acid selected from the following options: Ala Leu Glu Thr Asp Ser
  MISC_FEATURE (69)..(69): Xaa at this position is a single (one, 1) amino acid selected from the following options: Ala Thr Arg Ile Ser Asn Val Met Asp
  MISC_FEATURE (70)..(70): Xaa at this position is a single (one, 1) amino acid selected from the following options: Leu Glu
  MISC_FEATURE (71)..(71): Xaa at this position is a single (one, 1) amino acid selected from the following options: Lys Arg Ile
  MISC_FEATURE (72)..(72): Xaa at this position is a single (one, 1) amino acid selected from the following options: Lys Asn Arg Thr Glu
  MISC_FEATURE (73)..(73): Xaa at this position is a single (one, 1) amino acid selected from the following options: Gly Pro Ala Val Leu Ile Met Cys Phe Tyr Trp His Lys Arg Gln Asn Glu Asp Ser Thr
  MISC_FEATURE (75)..(75): Xaa at this position is a single (one, 1) amino acid selected from the following options: Glu Gln Lys Val
  MISC_FEATURE (76)..(76): Xaa at this position is a single (one, 1) amino acid selected from the following options: Glu Asp Asn Lys
  MISC_FEATURE (77)..(77): Xaa at this position is a single (one, 1) amino acid selected from the following options: Glu Val
  MISC_FEATURE (78)..(78): Xaa at this position is a single (one, 1) amino acid selected from the following options: Ile Val
  MISC_FEATURE (79)..(79): Xaa at this position is a single (one, 1) amino acid selected from the following options: Val Thr Ser Asp Asn Gly Ala Glu Gln Tyr Arg
  MISC_FEATURE (80)..(80): Xaa at this position is a single (one, 1) amino acid selected from the following options: Gly Pro Ala Val Leu Ile Met Cys Phe Tyr Trp His Lys Arg Gln Asn Glu Asp Ser Thr
  MISC_FEATURE (81)..(81): Xaa at this position is a single (one, 1) amino acid selected from the following options: Gly Pro Ala Val Leu Ile Met Cys Phe Tyr Trp His Lys Arg Gln Asn Glu Asp Ser Thr
  MISC_FEATURE (82)..(82): Xaa at this position is a single (one, 1) amino acid selected from the following options: Lys Ser Met Val His Ala Arg Gln Glu Ile Leu Val
  MISC_FEATURE (83)..(83): Xaa at this position is a single (one, 1) amino acid selected from the following options: Lys Glu Gln Arg Gly
  MISC_FEATURE (84)..(84): Xaa at this position is a single (one, 1) amino acid selected from the following options: Glu Ala Gln
  MISC_FEATURE (86)..(86): Xaa at this position is a single (one, 1) amino acid selected from the following options: Glu Lys Asp Gln
  MISC_FEATURE (87)..(87): Xaa at this position is a single (one, 1) amino acid selected from the following options: Arg His Leu Gln Cys Val Gln
  MISC_FEATURE (88)..(88): Xaa at this position is a single (one, 1) amino acid selected from the following options: Leu Met
  MISC_FEATURE (89)..(89): Xaa at this position is a single (one, 1) amino acid selected from the following options: Gln Glu Lys
  MISC_FEATURE (90)..(90): Xaa at this position is a single (one, 1) amino acid selected from the following options: Lys Asn Arg Gln
  MISC_FEATURE (91)..(91): Xaa at this position is a single (one, 1) amino acid selected from the following options: Glu Gln Asn
  MISC_FEATURE (92)..(92): Xaa at this position is a single (one, 1) amino acid selected from the following options: Ile Met
  MISC_FEATURE (93)..(93): Xaa at this position is a single (one, 1) amino acid selected from the following options: Glu Gln Asp Ile Lys
  MISC_FEATURE (94)..(94): Xaa at this position is a single (one, 1) amino acid selected from the following options: Arg Gln Lys Glu
  MISC_FEATURE (95)..(95): Xaa at this position is a single (one, 1) amino acid selected from the following options: His Leu Ile
  MISC_FEATURE (96)..(96): Xaa at this position is a single (one, 1) amino acid selected from the following options: Lys Gln Glu
  MISC_FEATURE (97)..(97): Xaa at this position is a single (one, 1) amino acid selected from the following options: Gln Lys Glu Tyr Gly Ser His Asp Asn
  MISC_FEATURE (98)..(98): Xaa at this position is a single (one, 1) amino acid selected from the following options: Lys Arg Ser Ala Asn Thr His Ser Leu
  MISC_FEATURE (99)..(99): Xaa at this position is a single (one, 1) amino acid selected from the following options: Ile Met Asp Val
  MISC_FEATURE (100)..(100): Xaa at this position is a single (one, 1) amino acid selected from the following options: Lys Gln Arg Asn
  MISC_FEATURE (101)..(101): Xaa at this position is a single (one, 1) amino acid selected from the following options: Met Thr Lys His Tyr Ser Gln Ile Val Asn Asp Arg
  MISC_FEATURE (103)..(103): Xaa at this position is a single (one, 1) amino acid selected from the following options: Lys Asn Ser His Arg Thr Gly
  MISC_FEATURE (104)..(104): Xaa at this position is a single (one, 1) amino acid selected from the following options: His Asp Asn Ser Arg Gln Glu Tyr Asn Leu Gln Gly
  MISC_FEATURE (105)..(105): Xaa at this position is a single (one, 1) amino acid selected from the following options: Asp His Ser Asn Ile or is absent (no amino acid at this position and so this position is not present)
  MISC_FEATURE (106)..(106): Xaa at this position is a single (one, 1) amino acid selected from the following options: Asp Glu His Gly Asn or is absent (no amino acid at this position and so this position is not present)
  MISC_FEATURE (107)..(107): Xaa at this position is a single (one, 1) amino acid selected from the following options: Asp His or is absent (no amino acid at this position and so this position is not present)
  MISC_FEATURE (108)..(108): Xaa at this position is a single (one, 1) amino acid selected from the following options: Asp Glu or is absent (no amino acid at this position and so this position is not present)
  MISC_FEATURE (109)..(109): Asp or is absent (no amino acid at this position and so this position is not present)
  MISC_FEATURE (110)..(110): Asp or is absent (no amino acid at this position and so this position is not present)
MAXXXXXXXXXXXXXXXXXXXXXXXXXXXXXXXXXXXXXXXXXXXXXXXXXXXXXXXXXXXXXXXXXXXXXXXKXXXXXXXXXXIXXXXXXXXXXXXXXXXLXXXXXXXX

SEQ ID NO: 68 - protein, 108 aa, Artificial Sequence
  Designed; as detailed elsewhere in present application
  MISC_FEATURE (3)..(3): Xaa at this position is a single (one, 1) amino acid selected from the following options: Val Gly Ala Thr
  MISC_FEATURE (4)..(4): Xaa at this position is a single (one, 1) amino acid selected from the following options: Thr Ser Pro
  MISC_FEATURE (5)..(5): Xaa at this position is a single (one, 1) amino acid selected from the following options: Ala Val Glu
  MISC_FEATURE (6)..(6): Xaa at this position is a single (one, 1) amino acid selected from the following options: Leu Thr Gln
  MISC_FEATURE (7)..(7): Xaa at this position is a single (one, 1) amino acid selected from the following options: Ala Val
  MISC_FEATURE (8)..(8): Xaa at this position is a single (one, 1) amino acid selected from the following options: Ala Val Leu Ile Thr
  MISC_FEATURE (9)..(9): Xaa at this position is a single (one, 1) amino acid selected from the following options: Arg Gln Trp
  MISC_FEATURE (10)..(10): Xaa at this position is a single (one, 1) amino acid selected from the following options: Thr Val Met Ala Ser Leu
  MISC_FEATURE (11)..(11): Xaa at this position is a single (one, 1) amino acid selected from the following options: Trp Arg Gln
  MISC_FEATURE (12)..(12): Xaa at this position is a single (one, 1) amino acid selected from the following options: Leu Phe Gln
  MISC_FEATURE (13)..(13): Xaa at this position is a single (one, 1) amino acid selected from the following options: Gly Tyr Cys Ala Arg
  MISC_FEATURE (14)..(14): Xaa at this position is a single (one, 1) amino acid selected from the following options: Val Ser Ala Thr Met Arg
  MISC_FEATURE (15)..(15): Xaa at this position is a single (one, 1) amino acid selected from the following options: Trp Leu
  MISC_FEATURE (16)..(16): Xaa at this position is a single (one, 1) amino acid selected from the following options: Gly Ser
  MISC_FEATURE (17)..(17): Xaa at this position is a single (one, 1) amino acid selected from the following options: Val Ala Met
  MISC_FEATURE (18)..(18): Xaa at this position is a single (one, 1) amino acid selected from the following options: Arg Trp Lys Leu
  MISC_FEATURE (19)..(19): Xaa at this position is a single (one, 1) amino acid selected from the following options: Thr Ala Val Ser
  MISC_FEATURE (20)..(20): Xaa at this position is a single (one, 1) amino acid selected from the following options: Met Leu Ile Arg Val Ala Thr
  MISC_FEATURE (21)..(21): Xaa at this position is a single (one, 1) amino acid selected from the following options: Gln Arg
  MISC_FEATURE (22)..(22): Xaa at this position is a single (one, 1) amino acid selected from the following options: Ala Thr Gly Ser
  MISC_FEATURE (23)..(23): Xaa at this position is a single (one, 1) amino acid selected from the following options: Arg Gln Gly Leu
  MISC_FEATURE (24)..(24): Xaa at this position is a single (one, 1) amino acid selected from the following options: Gly Ser
  MISC_FEATURE (25)..(25): Xaa at this position is a single (one, 1) amino acid selected from the following options: Phe Tyr
  MISC_FEATURE (26)..(26): Xaa at this position is a single (one, 1) amino acid selected from the following options: Gly Leu
  MISC_FEATURE (27)..(27): Xaa at this position is a single (one, 1) amino acid selected from the following options: Ser Gly
  MISC_FEATURE (28)..(28): Xaa at this position is a single (one, 1) amino acid selected from the following options: Glu Asp Ser
  MISC_FEATURE (29)..(29): Xaa at this position is a single (one, 1) amino acid selected from the following options: Gly Ser Gln Pro
  MISC_FEATURE (30)..(30): Xaa at this position is a single (one, 1) amino acid selected from the following options: Ala Ser
  MISC_FEATURE (31)..(31): Xaa at this position is a single (one, 1) amino acid selected from the following options: Asp Gly Glu
  MISC_FEATURE (32)..(32): Xaa at this position is a single (one, 1) amino acid selected from the following options: Asn Lys
  MISC_FEATURE (33)..(33): Xaa at this position is a single (one, 1) amino acid selected from the following options: Leu Gly Val
  MISC_FEATURE (34)..(34): Xaa at this position is a single (one, 1) amino acid selected from the following options: Gly Asp
  MISC_FEATURE (35)..(35): Xaa at this position is a single (one, 1) amino acid selected from the following options: Ser Gly Arg
  MISC_FEATURE (36)..(36): Xaa at this position is a single (one, 1) amino acid selected from the following options: Ser Gly
  MISC_FEATURE (37)..(37): Xaa at this position is a single (one, 1) amino acid selected from the following options: Ala Gly Glu
  MISC_FEATURE (38)..(38): Xaa at this position is a single (one, 1) amino acid selected from the following options: Gly Ala
  MISC_FEATURE (39)..(39): Xaa at this position is a single (one, 1) amino acid selected from the following options: Gly Pro Ala Val Leu Ile Met Cys Phe Tyr Trp His Lys Arg Gln Asn Glu Asp Ser Thr
  MISC_FEATURE (40)..(40): Xaa at this position is a single (one, 1) amino acid selected from the following options: Ile Val
  MISC_FEATURE (41)..(41): Xaa at this position is a single (one, 1) amino acid selected from the following options: Arg Trp
  MISC_FEATURE (42)..(42): Xaa at this position is a single (one, 1) amino acid selected from the following options: Asp Glu Asn
  MISC_FEATURE (45)..(45): Xaa at this position is a single (one, 1) amino acid selected from the following options: Gly Val
  MISC_FEATURE (46)..(46): Xaa at this position is a single (one, 1) amino acid selected from the following options: Ala Asp
  MISC_FEATURE (48)..(48): Xaa at this position is a single (one, 1) amino acid selected from the following options: Gly Arg
  MISC_FEATURE (50)..(50): Xaa at this position is a single (one, 1) amino acid selected from the following options: Lys Arg
  MISC_FEATURE (51)..(51): Xaa at this position is a single (one, 1) amino acid selected from the following options: Gly Pro Ala Val Leu Ile Met Cys Phe Tyr Trp His Lys Arg Gln Asn Glu Asp Ser Thr
  MISC_FEATURE (52)..(52): Xaa at this position is a single (one, 1) amino acid selected from the following options: Gln Ala
  MISC_FEATURE (54)..(54): Xaa at this position is a single (one, 1) amino acid selected from the following options: Glu His Lys
  MISC_FEATURE (55)..(55): Xaa at this position is a single (one, 1) amino acid selected from the following options: Glu Gly
  MISC_FEATURE (59)..(59): Xaa at this position is a single (one, 1) amino acid selected from the following options: Phe Leu
  MISC_FEATURE (61)..(61): Xaa at this position is a single (one, 1) amino acid selected from the following options: Ala Glu Asp
  MISC_FEATURE (62)..(62): Xaa at this position is a single (one, 1) amino acid selected from the following options: Arg Lys Gln
  MISC_FEATURE (63)..(63): Xaa at this position is a single (one, 1) amino acid selected from the following options: Ala Glu Ser
  MISC_FEATURE (64)..(64): Xaa at this position is a single (one, 1) amino acid selected from the following options: Lys Arg
  MISC_FEATURE (69)..(69): Xaa at this position is a single (one, 1) amino acid selected from the following options: Ala Ser
  MISC_FEATURE (71)..(71): Xaa at this position is a single (one, 1) amino acid selected from the following options: Lys Arg
  MISC_FEATURE (72)..(72): Xaa at this position is a single (one, 1) amino acid selected from the following options: Lys Glu
  MISC_FEATURE (73)..(73): Xaa at this position is a single (one, 1) amino acid selected from the following options: Gly Pro Ala Val Leu Ile Met Cys Phe Tyr Trp His Lys Arg Gln Asn Glu Asp Ser Thr
  MISC_FEATURE (76)..(76): Xaa at this position is a single (one, 1) amino acid selected from the following options: Glu Asn
  MISC_FEATURE (79)..(79): Xaa at this position is a single (one, 1) amino acid selected from the following options: Ser Asp Val
  MISC_FEATURE (80)..(80): Xaa at this position is a single (one, 1) amino acid selected from the following options: Gly Pro Ala Val Leu Ile Met Cys Phe Tyr Trp His Lys Arg Gln Asn Glu Asp Ser Thr
  MISC_FEATURE (81)..(81): Xaa at this position is a single (one, 1) amino acid selected from the following options: Gly Pro Ala Val Leu Ile Met Cys Phe Tyr Trp His Lys Arg Gln Asn Glu Asp Ser Thr
  MISC_FEATURE (82)..(82): Xaa at this position is a single (one, 1) amino acid selected from the following options: Lys Val
  MISC_FEATURE (86)..(86): Xaa at this position is a single (one, 1) amino acid selected from the following options: Glu Gln
  MISC_FEATURE (87)..(87): Xaa at this position is a single (one, 1) amino acid selected from the following options: His Arg
  MISC_FEATURE (93)..(93): Xaa at this position is a single (one, 1) amino acid selected from the following options: Glu Asp
  MISC_FEATURE (97)..(97): Xaa at this position is a single (one, 1) amino acid selected from the following options: Gln Asn
  MISC_FEATURE (98)..(98): Xaa at this position is a single (one, 1) amino acid selected from the following options: Ser Lys
  MISC_FEATURE (101)..(101): Xaa at this position is a single (one, 1) amino acid selected from the following options: Lys Met
  MISC_FEATURE (104)..(104): Xaa at this position is a single (one, 1) amino acid selected from the following options: His Gly
  MISC_FEATURE (107)..(107): Asp or is absent (no amino acid at this position and so this position is not present)
  MISC_FEATURE (108)..(108): Asp or is absent (no amino acid at this position and so this position is not present)
MAXXXXXXXXXXXXXXXXXXXXXXXXXXXXXXXXXXXXXXXXAGXXFXKXXXAXXERYXRXXXXEQLAXLXXXKEXEIXXXXKEIXXLQKEIXRHKXXIKXLKXDDXX

SEQ ID NO: 69 - protein, 108 aa, Artificial Sequence
  Designed; as detailed elsewhere in present application
  MISC_FEATURE (3)..(3): Xaa at this position is a single (one, 1) amino acid selected from the following options: Val Gly Ala Thr
  MISC_FEATURE (4)..(4): Xaa at this position is a single (one, 1) amino acid selected from the following options: Thr Ser Pro
  MISC_FEATURE (5)..(5): Xaa at this position is a single (one, 1) amino acid selected from the following options: Ala Val Glu
  MISC_FEATURE (6)..(6): Xaa at this position is a single (one, 1) amino acid selected from the following options: Leu Thr Gln
  MISC_FEATURE (7)..(7): Xaa at this position is a single (one, 1) amino acid selected from the following options: Ala Val
  MISC_FEATURE (8)..(8): Xaa at this position is a single (one, 1) amino acid selected from the following options: Ala Val Leu Ile Thr
  MISC_FEATURE (9)..(9): Xaa at this position is a single (one, 1) amino acid selected from the following options: Arg Gln Trp
  MISC_FEATURE (10)..(10): Xaa at this position is a single (one, 1) amino acid selected from the following options: Thr Val Met Ala Ser Leu
  MISC_FEATURE (11)..(11): Xaa at this position is a single (one, 1) amino acid selected from the following options: Trp Arg Gln
  MISC_FEATURE (12)..(12): Xaa at this position is a single (one, 1) amino acid selected from the following options: Leu Phe Gln
  MISC_FEATURE (13)..(13): Xaa at this position is a single (one, 1) amino acid selected from the following options: Gly Tyr Cys Ala Arg
  MISC_FEATURE (14)..(14): Xaa at this position is a single (one, 1) amino acid selected from the following options: Val Ser Ala Thr Met Arg
  MISC_FEATURE (15)..(15): Xaa at this position is a single (one, 1) amino acid selected from the following options: Trp Leu
  MISC_FEATURE (16)..(16): Xaa at this position is a single (one, 1) amino acid selected from the following options: Gly Ser
  MISC_FEATURE (17)..(17): Xaa at this position is a single (one, 1) amino acid selected from the following options: Val Ala Met
  MISC_FEATURE (18)..(18): Xaa at this position is a single (one, 1) amino acid selected from the following options: Arg Trp Lys Leu
  MISC_FEATURE (19)..(19): Xaa at this position is a single (one, 1) amino acid selected from the following options: Thr Ala Val Ser
  MISC_FEATURE (20)..(20): Xaa at this position is a single (one, 1) amino acid selected from the following options: Met Leu Ile Arg Val Ala Thr
  MISC_FEATURE (21)..(21): Xaa at this position is a single (one, 1) amino acid selected from the following options: Gln Arg
  MISC_FEATURE (22)..(22): Xaa at this position is a single (one, 1) amino acid selected from the following options: Ala Thr Gly Ser
  MISC_FEATURE (23)..(23): Xaa at this position is a single (one, 1) amino acid selected from the following options: Arg Gln Gly Leu
  MISC_FEATURE (24)..(24): Xaa at this position is a single (one, 1) amino acid selected from the following options: Gly Ser
  MISC_FEATURE (25)..(25): Xaa at this position is a single (one, 1) amino acid selected from the following options: Phe Tyr
  MISC_FEATURE (26)..(26): Xaa at this position is a single (one, 1) amino acid selected from the following options: Gly Leu
  MISC_FEATURE (27)..(27): Xaa at this position is a single (one, 1) amino acid selected from the following options: Ser Gly
  MISC_FEATURE (28)..(28): Xaa at this position is a single (one, 1) amino acid selected from the following options: Glu Asp
  MISC_FEATURE (29)..(29): Xaa at this position is a single (one, 1) amino acid selected from the following options: Gly Ser
  MISC_FEATURE (30)..(30): Xaa at this position is a single (one, 1) amino acid selected from the following options: Ala Ser
  MISC_FEATURE (31)..(31): Xaa at this position is a single (one, 1) amino acid selected from the following options: Asp Gly
  MISC_FEATURE (32)..(32): Xaa at this position is a single (one, 1) amino acid selected from the following options: Asn Lys
  MISC_FEATURE (33)..(33): Xaa at this position is a single (one, 1) amino acid selected from the following options: Leu Gly
  MISC_FEATURE (34)..(34): Xaa at this position is a single (one, 1) amino acid selected from the following options: Gly Asp
  MISC_FEATURE (35)..(35): Xaa at this position is a single (one, 1) amino acid selected from the following options: Ser Gly
  MISC_FEATURE (36)..(36): Xaa at this position is a single (one, 1) amino acid selected from the following options: Ser Gly
  MISC_FEATURE (37)..(37): Xaa at this position is a single (one, 1) amino acid selected from the following options: Ala Gly
  MISC_FEATURE (38)..(38): Xaa at this position is a single (one, 1) amino acid selected from the following options: Gly Ala
  MISC_FEATURE (39)..(39): Xaa at this position is a single (one, 1) amino acid selected from the following options: Gly Pro Ala Val Leu Ile Met Cys Phe Tyr Trp His Lys Arg Gln Asn Glu Asp Ser Thr
  MISC_FEATURE (40)..(40): Xaa at this position is a single (one, 1) amino acid selected from the following options: Ile Val
  MISC_FEATURE (41)..(41): Xaa at this position is a single (one, 1) amino acid selected from the following options: Arg Trp
  MISC_FEATURE (42)..(42): Xaa at this position is a single (one, 1) amino acid selected from the following options: Asp Glu
  MISC_FEATURE (50)..(50): Xaa at this position is a single (one, 1) amino acid selected from the following options: Lys Arg
  MISC_FEATURE (51)..(51): Xaa at this position is a single (one, 1) amino acid selected from the following options: Gly Pro Ala Val Leu Ile Met Cys Phe Tyr Trp His Lys Arg Gln Asn Glu Asp Ser Thr
  MISC_FEATURE (52)..(52): Xaa at this position is a single (one, 1) amino acid selected from the following options: Gln Ala
  MISC_FEATURE (54)..(54): Xaa at this position is a single (one, 1) amino acid selected from the following options: Glu His
  MISC_FEATURE (59)..(59): Xaa at this position is a single (one, 1) amino acid selected from the following options: Phe Leu
  MISC_FEATURE (61)..(61): Xaa at this position is a single (one, 1) amino acid selected from the following options: Ala Glu
  MISC_FEATURE (62)..(62): Xaa at this position is a single (one, 1) amino acid selected from the following options: Arg Lys
  MISC_FEATURE (63)..(63): Xaa at this position is a single (one, 1) amino acid selected from the following options: Ala Glu
  MISC_FEATURE (64)..(64): Xaa at this position is a single (one, 1) amino acid selected from the following options: Lys Arg
  MISC_FEATURE (69)..(69): Xaa at this position is a single (one, 1) amino acid selected from the following options: Ala Ser
  MISC_FEATURE (71)..(71): Xaa at this position is a single (one, 1) amino acid selected from the following options: Lys Arg
  MISC_FEATURE (72)..(72): Xaa at this position is a single (one, 1) amino acid selected from the following options: Lys Glu
  MISC_FEATURE (73)..(73): Xaa at this position is a single (one, 1) amino acid selected from the following options: Gly Pro Ala Val Leu Ile Met Cys Phe Tyr Trp His Lys Arg Gln Asn Glu Asp Ser Thr
  MISC_FEATURE (76)..(76): Xaa at this position is a single (one, 1) amino acid selected from the following options: Glu Asn
  MISC_FEATURE (79)..(79): Xaa at this position is a single (one, 1) amino acid selected from the following options: Ser Asp
  MISC_FEATURE (80)..(80): Xaa at this position is a single (one, 1) amino acid selected from the following options: Gly Pro Ala Val Leu Ile Met Cys Phe Tyr Trp His Lys Arg Gln Asn Glu Asp Ser Thr
  MISC_FEATURE (81)..(81): Xaa at this position is a single (one, 1) amino acid selected from the following options: Gly Pro Ala Val Leu Ile Met Cys Phe Tyr Trp His Lys Arg Gln Asn Glu Asp Ser Thr
  MISC_FEATURE (82)..(82): Xaa at this position is a single (one, 1) amino acid selected from the following options: Lys Val
  MISC_FEATURE (86)..(86): Xaa at this position is a single (one, 1) amino acid selected from the following options: Glu Gln
  MISC_FEATURE (87)..(87): Xaa at this position is a single (one, 1) amino acid selected from the following options: His Arg
  MISC_FEATURE (93)..(93): Xaa at this position is a single (one, 1) amino acid selected from the following options: Glu Asp
  MISC_FEATURE (97)..(97): Xaa at this position is a single (one, 1) amino acid selected from the following options: Gln Asn
  MISC_FEATURE (98)..(98): Xaa at this position is a single (one, 1) amino acid selected from the following options: Ser Lys
  MISC_FEATURE (104)..(104): Xaa at this position is a single (one, 1) amino acid selected from the following options: His Gly
  MISC_FEATURE (108)..(108): Asp or is absent (no amino acid at this position and so this position is not present)
MAXXXXXXXXXXXXXXXXXXXXXXXXXXXXXXXXXXXXXXXXAGGAFGKXXXAXEERYXRXXXXEQLAXLXXXKEXEIXXXXKEIXXLQKEIXRHKXXIKKLKXDDDX

SEQ ID NO: 70 - protein, 108 aa, Artificial Sequence
  Designed; as detailed elsewhere in present application
  MISC_FEATURE (26)..(26): Xaa at this position is a single (one, 1) amino acid selected from the following options: Gly Leu
  MISC_FEATURE (27)..(27): Xaa at this position is a single (one, 1) amino acid selected from the following options: Ser Gly
  MISC_FEATURE (28)..(28): Xaa at this position is a single (one, 1) amino acid selected from the following options: Glu Asp
  MISC_FEATURE (29)..(29): Xaa at this position is a single (one, 1) amino acid selected from the following options: Gly Ser
  MISC_FEATURE (30)..(30): Xaa at this position is a single (one, 1) amino acid selected from the following options: Ala Ser
  MISC_FEATURE (31)..(31): Xaa at this position is a single (one, 1) amino acid selected from the following options: Asp Gly
  MISC_FEATURE (32)..(32): Xaa at this position is a single (one, 1) amino acid selected from the following options: Asn Lys
  MISC_FEATURE (33)..(33): Xaa at this position is a single (one, 1) amino acid selected from the following options: Leu Gly
  MISC_FEATURE (34)..(34): Xaa at this position is a single (one, 1) amino acid selected from the following options: Gly Asp
  MISC_FEATURE (35)..(35): Xaa at this position is a single (one, 1) amino acid selected from the following options: Ser Gly
  MISC_FEATURE (36)..(36): Xaa at this position is a single (one, 1) amino acid selected from the following options: Ser Gly
  MISC_FEATURE (37)..(37): Xaa at this position is a single (one, 1) amino acid selected from the following options: Ala Gly
  MISC_FEATURE (38)..(38): Xaa at this position is a single (one, 1) amino acid selected from the following options: Gly Ala
  MISC_FEATURE (39)..(39): Xaa at this position is a single (one, 1) amino acid selected from the following options: Gly Pro Ala Val Leu Ile Met Cys Phe Tyr Trp His Lys Arg Gln Asn Glu Asp Ser Thr
  MISC_FEATURE (40)..(40): Xaa at this position is a single (one, 1) amino acid selected from the following options: Ile Val
  MISC_FEATURE (41)..(41): Xaa at this position is a single (one, 1) amino acid selected from the following options: Arg Trp
  MISC_FEATURE (42)..(42): Xaa at this position is a single (one, 1) amino acid selected from the following options: Asp Glu
  MISC_FEATURE (50)..(50): Xaa at this position is a single (one, 1) amino acid selected from the following options: Lys Arg
  MISC_FEATURE (51)..(51): Xaa at this position is a single (one, 1) amino acid selected from the following options: Gly Pro Ala Val Leu Ile Met Cys Phe Tyr Trp His Lys Arg Gln Asn Glu Asp Ser Thr
  MISC_FEATURE (52)..(52): Xaa at this position is a single (one, 1) amino acid selected from the following options: Gln Ala
  MISC_FEATURE (54)..(54): Xaa at this position is a single (one, 1) amino acid selected from the following options: Glu His
  MISC_FEATURE (59)..(59): Xaa at this position is a single (one, 1) amino acid selected from the following options: Phe Leu
  MISC_FEATURE (61)..(61): Xaa at this position is a single (one, 1) amino acid selected from the following options: Ala Glu
  MISC_FEATURE (62)..(62): Xaa at this position is a single (one, 1) amino acid selected from the following options: Arg Lys
  MISC_FEATURE (63)..(63): Xaa at this position is a single (one, 1) amino acid selected from the following options: Ala Glu
  MISC_FEATURE (64)..(64): Xaa at this position is a single (one, 1) amino acid selected from the following options: Lys Arg
  MISC_FEATURE (69)..(69): Xaa at this position is a single (one, 1) amino acid selected from the following options: Ala Ser
  MISC_FEATURE (71)..(71): Xaa at this position is a single (one, 1) amino acid selected from the following options: Lys Arg
  MISC_FEATURE (72)..(72): Xaa at this position is a single (one, 1) amino acid selected from the following options: Lys Glu
  MISC_FEATURE (73)..(73): Xaa at this position is a single (one, 1) amino acid selected from the following options: Gly Pro Ala Val Leu Ile Met Cys Phe Tyr Trp His Lys Arg Gln Asn Glu Asp Ser Thr
  MISC_FEATURE (76)..(76): Xaa at this position is a single (one, 1) amino acid selected from the following options: Glu Asn
  MISC_FEATURE (79)..(79): Xaa at this position is a single (one, 1) amino acid selected from the following options: Ser Asp
  MISC_FEATURE (80)..(80): Xaa at this position is a single (one, 1) amino acid selected from the following options: Gly Pro Ala Val Leu Ile Met Cys Phe Tyr Trp His Lys Arg Gln Asn Glu Asp Ser Thr
  MISC_FEATURE (81)..(81): Xaa at this position is a single (one, 1) amino acid selected from the following options: Gly Pro Ala Val Leu Ile Met Cys Phe Tyr Trp His Lys Arg Gln Asn Glu Asp Ser Thr
  MISC_FEATURE (82)..(82): Xaa at this position is a single (one, 1) amino acid selected from the following options: Lys Val
  MISC_FEATURE (86)..(86): Xaa at this position is a single (one, 1) amino acid selected from the following options: Glu Gln
  MISC_FEATURE (87)..(87): Xaa at this position is a single (one, 1) amino acid selected from the following options: His Arg
  MISC_FEATURE (93)..(93): Xaa at this position is a single (one, 1) amino acid selected from the following options: Glu Asp
  MISC_FEATURE (97)..(97): Xaa at this position is a single (one, 1) amino acid selected from the following options: Gln Asn
  MISC_FEATURE (98)..(98): Xaa at this position is a single (one, 1) amino acid selected from the following options: Ser Lys
  MISC_FEATURE (104)..(104): Xaa at this position is a single (one, 1) amino acid selected from the following options: His Gly
  MISC_FEATURE (108)..(108): Asp or is absent (no amino acid at this position and so this position is not present)
MAVTALAARTWLGVWGVRTMQARGFXXXXXXXXXXXXXXXXXAGGAFGKXXXAXEERYXRXXXXEQLAXLXXXKEXEIXXXXKEIXXLQKEIXRHKXXIKKLKXDDDX

SEQ ID NO: 71 - protein, 108 aa, Artificial Sequence
  Designed; as detailed elsewhere in present application
  MISC_FEATURE (26)..(26): Xaa at this position is a single (one, 1) amino acid selected from the following options: Gly Leu
  MISC_FEATURE (27)..(27): Xaa at this position is a single (one, 1) amino acid selected from the following options: Ser Gly
  MISC_FEATURE (28)..(28): Xaa at this position is a single (one, 1) amino acid selected from the following options: Glu Asp
  MISC_FEATURE (29)..(29): Xaa at this position is a single (one, 1) amino acid selected from the following options: Gly Ser
  MISC_FEATURE (30)..(30): Xaa at this position is a single (one, 1) amino acid selected from the following options: Ala Ser
  MISC_FEATURE (31)..(31): Xaa at this position is a single (one, 1) amino acid selected from the following options: Asp Gly
  MISC_FEATURE (32)..(32): Xaa at this position is a single (one, 1) amino acid selected from the following options: Asn Lys
  MISC_FEATURE (33)..(33): Xaa at this position is a single (one, 1) amino acid selected from the following options: Leu Gly
  MISC_FEATURE (34)..(34): Xaa at this position is a single (one, 1) amino acid selected from the following options: Gly Asp
  MISC_FEATURE (35)..(35): Xaa at this position is a single (one, 1) amino acid selected from the following options: Ser Gly
  MISC_FEATURE (36)..(36): Xaa at this position is a single (one, 1) amino acid selected from the following options: Ser Gly
  MISC_FEATURE (37)..(37): Xaa at this position is a single (one, 1) amino acid selected from the following options: Ala Gly
  MISC_FEATURE (38)..(38): Xaa at this position is a single (one, 1) amino acid selected from the following options: Gly Ala
  MISC_FEATURE (39)..(39): Xaa at this position is a single (one, 1) amino acid selected from the following options: Gly Pro Ala Val Leu Ile Met Cys Phe Tyr Trp His Lys Arg Gln Asn Glu Asp Ser Thr
  MISC_FEATURE (40)..(40): Xaa at this position is a single (one, 1) amino acid selected from the following options: Ile Val
  MISC_FEATURE (41)..(41): Xaa at this position is a single (one, 1) amino acid selected from the following options: Arg Trp
  MISC_FEATURE (42)..(42): Xaa at this position is a single (one, 1) amino acid selected from the following options: Asp Glu
  MISC_FEATURE (50)..(50): Xaa at this position is a single (one, 1) amino acid selected from the following options: Lys Arg
  MISC_FEATURE (51)..(51): Xaa at this position is a single (one, 1) amino acid selected from the following options: Gly Pro Ala Val Leu Ile Met Cys Phe Tyr Trp His Lys Arg Gln Asn Glu Asp Ser Thr
  MISC_FEATURE (52)..(52): Xaa at this position is a single (one, 1) amino acid selected from the following options: Gln Ala
  MISC_FEATURE (54)..(54): Xaa at this position is a single (one, 1) amino acid selected from the following options: Glu His
  MISC_FEATURE (59)..(59): Xaa at this position is a single (one, 1) amino acid selected from the following options: Phe Leu
  MISC_FEATURE (61)..(61): Xaa at this position is a single (one, 1) amino acid selected from the following options: Ala Glu
  MISC_FEATURE (62)..(62): Xaa at this position is a single (one, 1) amino acid selected from the following options: Arg Lys
  MISC_FEATURE (63)..(63): Xaa at this position is a single (one, 1) amino acid selected from the following options: Ala Glu
  MISC_FEATURE (64)..(64): Xaa at this position is a single (one, 1) amino acid selected from the following options: Lys Arg
  MISC_FEATURE (69)..(69): Xaa at this position is a single (one, 1) amino acid selected from the following options: Ala Ser
  MISC_FEATURE (71)..(71): Xaa at this position is a single (one, 1) amino acid selected from the following options: Lys Arg
  MISC_FEATURE (72)..(72): Xaa at this position is a single (one, 1) amino acid selected from the following options: Lys Glu
  MISC_FEATURE (73)..(73): Xaa at this position is a single (one, 1) amino acid selected from the following options: Gly Pro Ala Val Leu Ile Met Cys Phe Tyr Trp His Lys Arg Gln Asn Glu Asp Ser Thr
  MISC_FEATURE (76)..(76): Xaa at this position is a single (one, 1) amino acid selected from the following options: Glu Asn
  MISC_FEATURE (79)..(79): Xaa at this position is a single (one, 1) amino acid selected from the following options: Ser Asp
  MISC_FEATURE (80)..(80): Xaa at this position is a single (one, 1) amino acid selected from the following options: Gly Pro Ala Val Leu Ile Met Cys Phe Tyr Trp His Lys Arg Gln Asn Glu Asp Ser Thr
  MISC_FEATURE (81)..(81): Xaa at this position is a single (one, 1) amino acid selected from the following options: Gly Pro Ala Val Leu Ile Met Cys Phe Tyr Trp His Lys Arg Gln Asn Glu Asp Ser Thr
  MISC_FEATURE (82)..(82): Xaa at this position is a single (one, 1) amino acid selected from the following options: Lys Val
  MISC_FEATURE (86)..(86): Xaa at this position is a single (one, 1) amino acid selected from the following options: Glu Gln
  MISC_FEATURE (87)..(87): Xaa at this position is a single (one, 1) amino acid selected from the following options: His Arg
  MISC_FEATURE (93)..(93): Xaa at this position is a single (one, 1) amino acid selected from the following options: Glu Asp
  MISC_FEATURE (97)..(97): Xaa at this position is a single (one, 1) amino acid selected from the following options: Gln Asn
  MISC_FEATURE (98)..(98): Xaa at this position is a single (one, 1) amino acid selected from the following options: Ser Lys
  MISC_FEATURE (104)..(104): Xaa at this position is a single (one, 1) amino acid selected from the following options: His Gly
  MISC_FEATURE (108)..(108): Asp or is absent (no amino acid at this position and so this position is not present)
MAGSALAVRARFGVWGMKVLQTRGFXXXXXXXXXXXXXXXXXAGGAFGKXXXAXEERYXRXXXXEQLAXLXXXKEXEIXXXXKEIXXLQKEIXRHKXXIKKLKXDDDX

SEQ ID NO: 72 - protein, 115 aa, Artificial Sequence
  Designed; as detailed elsewhere in present application
  MISC_FEATURE (3)..(3): Xaa at this position is a single (one, 1) amino acid selected from the following options: Val Gly Ala Thr
  MISC_FEATURE (4)..(4): Xaa at this position is a single (one, 1) amino acid selected from the following options: Thr Ser Pro
  MISC_FEATURE (5)..(5): Xaa at this position is a single (one, 1) amino acid selected from the following options: Glu Ala Val
  MISC_FEATURE (6)..(6): Xaa at this position is a single (one, 1) amino acid selected from the following options: Leu Thr Gln
  MISC_FEATURE (7)..(7): Xaa at this position is a single (one, 1) amino acid selected from the following options: Ala Val
  MISC_FEATURE (8)..(8): Xaa at this position is a single (one, 1) amino acid selected from the following options: Ala Val Leu Ile Thr
  MISC_FEATURE (9)..(9): Xaa at this position is a single (one, 1) amino acid selected from the following options: Trp Arg Gln
  MISC_FEATURE (10)..(10): Xaa at this position is a single (one, 1) amino acid selected from the following options: Thr Val Met Ala Ser Leu
  MISC_FEATURE (11)..(11): Xaa at this position is a single (one, 1) amino acid selected from the following options: Gln Trp Arg
  MISC_FEATURE (12)..(12): Xaa at this position is a single (one, 1) amino acid selected from the following options: Leu Phe Gln
  MISC_FEATURE (13)..(13): Xaa at this position is a single (one, 1) amino acid selected from the following options: Arg Gly Tyr Cys Ala
  MISC_FEATURE (14)..(14): Xaa at this position is a single (one, 1) amino acid selected from the following options: Val Ser Ala Thr Met Arg
  MISC_FEATURE (15)..(15): Xaa at this position is a single (one, 1) amino acid selected from the following options: Trp Leu
  MISC_FEATURE (16)..(16): Xaa at this position is a single (one, 1) amino acid selected from the following options: Gly Ser
  MISC_FEATURE (17)..(17): Xaa at this position is a single (one, 1) amino acid selected from the following options: Val Ala Met
  MISC_FEATURE (18)..(18): Xaa at this position is a single (one, 1) amino acid selected from the following options: Arg Trp Lys Leu
  MISC_FEATURE (19)..(19): Xaa at this position is a single (one, 1) amino acid selected from the following options: Thr Ala Val Ser
  MISC_FEATURE (20)..(20): Xaa at this position is a single (one, 1) amino acid selected from the following options: Met Leu Ile Arg Val Ala Thr
  MISC_FEATURE (21)..(21): Xaa at this position is a single (one, 1) amino acid selected from the following options: Gln Arg
  MISC_FEATURE (22)..(22): Xaa at this position is a single (one, 1) amino acid selected from the following options: Ala Thr Gly Ser
  MISC_FEATURE (23)..(23): Xaa at this position is a single (one, 1) amino acid selected from the following options: Leu Arg Gln Gly
  MISC_FEATURE (24)..(24): Xaa at this position is a single (one, 1) amino acid selected from the following options: Gly Ser
  MISC_FEATURE (25)..(25): Xaa at this position is a single (one, 1) amino acid selected from the following options: Phe Tyr
  MISC_FEATURE (26)..(26): Xaa at this position is a single (one, 1) amino acid selected from the following options: Gly Ser Val Ala Thr Leu Arg Phe Ile Lys Met Gln Asn
  MISC_FEATURE (27)..(27): Xaa at this position is a single (one, 1) amino acid selected from the following options: Ser Cys Arg Gly Phe Thr Pro
  MISC_FEATURE (28)..(28): Xaa at this position is a single (one, 1) amino acid selected from the following options: Asp Glu Gly Ser Phe Lys Thr Leu Phe Pro
  MISC_FEATURE (29)..(29): Xaa at this position is a single (one, 1) amino acid selected from the following options: Pro Gln Arg Ser Thr Lys Gly Glu Ala Phe
  MISC_FEATURE (30)..(30): Xaa at this position is a single (one, 1) amino acid selected from the following options: Ser Pro Ala Gly Arg Glu Asp Val
  MISC_FEATURE (31)..(31): Xaa at this position is a single (one, 1) amino acid selected from the following options: Glu Asp Lys His Ala Gly Asn Ser Arg Gln Asp Thr Leu Val
  MISC_FEATURE (32)..(32): Xaa at this position is a single (one, 1) amino acid selected from the following options: Asn Asp Tyr Ser Gly Arg His Lys Glu Ala Leu
  MISC_FEATURE (33)..(33): Xaa at this position is a single (one, 1) amino acid selected from the following options: Val Leu Pro His Met Ile Phe Thr Gly Gly Ser Asp Glu Phe
  MISC_FEATURE (34)..(34): Xaa at this position is a single (one, 1) amino acid selected from the following options: Asp Gly His Arg Ser Glu Pro
  MISC_FEATURE (35)..(35): Xaa at this position is a single (one, 1) amino acid selected from the following options: Arg Ser Gly Thr Pro Ala Lys Glu
  MISC_FEATURE (36)..(36): Xaa at this position is a single (one, 1) amino acid selected from the following options: Arg Thr Gly Ser Arg Pro Lys Asp Ala
  MISC_FEATURE (37)..(37): Xaa at this position is a single (one, 1) amino acid selected from the following options: Ala Glu Ser Gly Arg
  MISC_FEATURE (38)..(38): Xaa at this position is a single (one, 1) amino acid selected from the following options: Ala Gly Gln Pro
  MISC_FEATURE (39)..(39): Xaa at this position is a single (one, 1) amino acid selected from the following options: Gly Pro Ala Val Leu Ile Met Cys Phe Tyr Trp His Lys Arg Gln Asn Glu Asp Ser Thr
  MISC_FEATURE (40)..(40): Xaa at this position is a single (one, 1) amino acid selected from the following options: Ile Val Leu Glu Phe
  MISC_FEATURE (41)..(41): Xaa at this position is a single (one, 1) amino acid selected from the following options: Trp Arg Lys Glu Thr Tyr
  MISC_FEATURE (42)..(42): Xaa at this position is a single (one, 1) amino acid selected from the following options: Asn Glu Asp Ala Lys Ser
  MISC_FEATURE (43)..(43): Xaa at this position is a single (one, 1) amino acid selected from the following options: Ala Arg Lys Cys
  MISC_FEATURE (44)..(44): Xaa at this position is a single (one, 1) amino acid selected from the following options: Gly Tyr Glu Pro
  MISC_FEATURE (45)..(45): Xaa at this position is a single (one, 1) amino acid selected from the following options: Val Gly Phe Lys Arg
  MISC_FEATURE (46)..(46): Xaa at this position is a single (one, 1) amino acid selected from the following options: Asp Ala Ser Arg Leu
  MISC_FEATURE (47)..(47): Xaa at this position is a single (one, 1) amino acid selected from the following options: Phe Leu Ile Glu Ser
  MISC_FEATURE (48)..(48): Xaa at this position is a single (one, 1) amino acid selected from the following options: Arg Gly Ala Ile Glu Ser Pro
  MISC_FEATURE (49)..(49): Xaa at this position is a single (one, 1) amino acid selected from the following options: Lys Arg Thr Glu Gln
  MISC_FEATURE (50)..(50): Xaa at this position is a single (one, 1) amino acid selected from the following options: Arg Lys Met
  MISC_FEATURE (51)..(51): Xaa at this position is a single (one, 1) amino acid selected from the following options: Gly Pro Ala Val Leu Ile Met Cys Phe Tyr Trp His Lys Arg Gln Asn Glu Asp Ser Thr
  MISC_FEATURE (52)..(52): Xaa at this position is a single (one, 1) amino acid selected from the following options: Gln Ala Lys Arg Pro Phe Val
  MISC_FEATURE (53)..(53): Xaa at this position is a single (one, 1) amino acid selected from the following options: Ala Ser Arg
  MISC_FEATURE (54)..(54): Xaa at this position is a single (one, 1) amino acid selected from the following options: Lys Glu Asp His Ala Ile
  MISC_FEATURE (55)..(55): Xaa at this position is a single (one, 1) amino acid selected from the following options: Gly Glu Pro Arg
  MISC_FEATURE (56)..(56): Xaa at this position is a single (one, 1) amino acid selected from the following options: Glu Asp Tyr Thr Gln
  MISC_FEATURE (57)..(57): Xaa at this position is a single (one, 1) amino acid selected from the following options: Arg Met Lys
  MISC_FEATURE (58)..(58): Xaa at this position is a single (one, 1) amino acid selected from the following options: Tyr Phe Glu
  MISC_FEATURE (59)..(59): Xaa at this position is a single (one, 1) amino acid selected from the following options: Leu Phe Pro Gln
  MISC_FEATURE (60)..(60): Xaa at this position is a single (one, 1) amino acid selected from the following options: Arg Leu Lys
  MISC_FEATURE (61)..(61): Xaa at this position is a single (one, 1) amino acid selected from the following options: Ala Lys Glu Thr Asp Gln Arg
  MISC_FEATURE (62)..(62): Xaa at this position is a single (one, 1) amino acid selected from the following options: Gln Arg Lys Ala Cys
  MISC_FEATURE (63)..(63): Xaa at this position is a single (one, 1) amino acid selected from the following options: Ser Thr Ala Asn Glu Leu
  MISC_FEATURE (64)..(64): Xaa at this position is a single (one, 1) amino acid selected from the following options: Arg Lys Gln His Ala
  MISC_FEATURE (65)..(65): Xaa at this position is a single (one, 1) amino acid selected from the following options: Glu Gln Lys
  MISC_FEATURE (66)..(66): Xaa at this position is a single (one, 1) amino acid selected from the following options: Gln Lys
  MISC_FEATURE (67)..(67): Xaa at this position is a single (one, 1) amino acid selected from the following options: Leu His Met Glu
  MISC_FEATURE (68)..(68): Xaa at this position is a single (one, 1) amino acid selected from the following options: Ala Leu Glu Thr Asp Ser
  MISC_FEATURE (69)..(69): Xaa at this position is a single (one, 1) amino acid selected from the following options: Ala Thr Arg Ile Ser Asn Val Met Asp
  MISC_FEATURE (70)..(70): Xaa at this position is a single (one, 1) amino acid selected from the following options: Leu Glu
  MISC_FEATURE (71)..(71): Xaa at this position is a single (one, 1) amino acid selected from the following options: Lys Arg Ile
  MISC_FEATURE (72)..(72): Xaa at this position is a single (one, 1) amino acid selected from the following options: Lys Asn Arg Thr Glu
  MISC_FEATURE (73)..(73): Xaa at this position is a single (one, 1) amino acid selected from the following options: Gly Pro Ala Val Leu Ile Met Cys Phe Tyr Trp His Lys Arg Gln Asn Glu Asp Ser Thr
  MISC_FEATURE (75)..(75): Xaa at this position is a single (one, 1) amino acid selected from the following options: Glu Gln Lys Val
  MISC_FEATURE (76)..(76): Xaa at this position is a single (one, 1) amino acid selected from the following options: Glu Asp Asn Lys
  MISC_FEATURE (77)..(77): Xaa at this position is a single (one, 1) amino acid selected from the following options: Glu Val
  MISC_FEATURE (78)..(78): Xaa at this position is a single (one, 1) amino acid selected from the following options: Ile Val
  MISC_FEATURE (79)..(79): Xaa at this position is a single (one, 1) amino acid selected from the following options: Val Thr Ser Asp Asn Gly Ala Glu Gln Tyr Arg
  MISC_FEATURE (80)..(80): Xaa at this position is a single (one, 1) amino acid selected from the following options: Gly Pro Ala Val Leu Ile Met Cys Phe Tyr Trp His Lys Arg Gln Asn Glu Asp Ser Thr
  MISC_FEATURE (81)..(81): Xaa at this position is a single (one, 1) amino acid selected from the following options: Gly Pro Ala Val Leu Ile Met Cys Phe Tyr Trp His Lys Arg Gln Asn Glu Asp Ser Thr
  MISC_FEATURE (82)..(82): Xaa at this position is a single (one, 1) amino acid selected from the following options: Lys Ser Met Val His Ala Arg Gln Glu Ile Leu Val
  MISC_FEATURE (83)..(83): Xaa at this position is a single (one, 1) amino acid selected from the following options: Lys Glu Gln Arg Gly
  MISC_FEATURE (84)..(84): Xaa at this position is a single (one, 1) amino acid selected from the following options: Glu Ala Gln
  MISC_FEATURE (86)..(86): Xaa at this position is a single (one, 1) amino acid selected from the following options: Glu Lys Asp Gln
  MISC_FEATURE (87)..(87): Xaa at this position is a single (one, 1) amino acid selected from the following options: Arg His Leu Gln Cys Val Gln
  MISC_FEATURE (88)..(88): Xaa at this position is a single (one, 1) amino acid selected from the following options: Leu Met
  MISC_FEATURE (89)..(89): Xaa at this position is a single (one, 1) amino acid selected from the following options: Gln Glu Lys
  MISC_FEATURE (90)..(90): Xaa at this position is a single (one, 1) amino acid selected from the following options: Lys Asn Arg Gln
  MISC_FEATURE (91)..(91): Xaa at this position is a single (one, 1) amino acid selected from the following options: Glu Gln Asn
  MISC_FEATURE (92)..(92): Xaa at this position is a single (one, 1) amino acid selected from the following options: Ile Met
  MISC_FEATURE (93)..(93): Xaa at this position is a single (one, 1) amino acid selected from the following options: Glu Gln Asp Ile Lys
  MISC_FEATURE (94)..(94): Xaa at this position is a single (one, 1) amino acid selected from the following options: Arg Gln Lys Glu
  MISC_FEATURE (95)..(95): Xaa at this position is a single (one, 1) amino acid selected from the following options: His Leu Ile
  MISC_FEATURE (96)..(96): Xaa at this position is a single (one, 1) amino acid selected from the following options: Lys Gln Glu
  MISC_FEATURE (97)..(97): Xaa at this position is a single (one, 1) amino acid selected from the following options: Gln Lys Glu Tyr Gly Ser His Asp Asn
  MISC_FEATURE (98)..(98): Xaa at this position is a single (one, 1) amino acid selected from the following options: Lys Arg Ser Ala Asn Thr His Ser Leu
  MISC_FEATURE (99)..(99): Xaa at this position is a single (one, 1) amino acid selected from the following options: Ile Met Asp Val
  MISC_FEATURE (100)..(100): Xaa at this position is a single (one, 1) amino acid selected from the following options: Lys Gln Arg Asn
  MISC_FEATURE (101)..(101): Xaa at this position is a single (one, 1) amino acid selected from the following options: Met Thr Lys His Tyr Ser Gln Ile Val Asn Asp Arg
  MISC_FEATURE (103)..(103): Xaa at this position is a single (one, 1) amino acid selected from the following options: Lys Asn Ser His Arg Thr Gly
  MISC_FEATURE (104)..(104): Xaa at this position is a single (one, 1) amino acid selected from the following options: His Asp Asn Ser Arg Gln Glu Tyr Asn Leu Gln Gly
  MISC_FEATURE (105)..(105): Xaa at this position is a single (one, 1) amino acid selected from the following options: Asp His Ser Asn Ile or is absent (no amino acid at this position and so this position is not present)
  MISC_FEATURE (106)..(106): Xaa at this position is a single (one, 1) amino acid selected from the following options: Asp Glu His Gly Asn or is absent (no amino acid at this position and so this position is not present)
  MISC_FEATURE (107)..(107): Xaa at this position is a single (one, 1) amino acid selected from the following options: Asp His or is absent (no amino acid at this position and so this position is not present)
  MISC_FEATURE (108)..(108): Xaa at this position is a single (one, 1) amino acid selected from the following options: Asp Glu or is absent (no amino acid at this position and so this position is not present)
  MISC_FEATURE (109)..(109): Asp or is absent (no amino acid at this position and so this position is not present)
  MISC_FEATURE (110)..(110): Asp or is absent (no amino acid at this position and so this position is not present)
  MISC_FEATURE (111)..(111): Asp or is absent (no amino acid at this position and so this position is not present)
  MISC_FEATURE (112)..(112): Asp or is absent (no amino acid at this position and so this position is not present)
  MISC_FEATURE (113)..(113): Asp or is absent (no amino acid at this position and so this position is not present)
  MISC_FEATURE (114)..(114): Asp or is absent (no amino acid at this position and so this position is not present)
  MISC_FEATURE (115)..(115): Asp or is absent (no amino acid at this position and so this position is not present)
MAXXXXXXXXXXXXXXXXXXXXXXXXXXXXXXXXXXXXXXXXXXXXXXXXXXXXXXXXXXXXXXXXXXXXXXXKXXXXXXXXXXIXXXXXXXXXXXXXXXXLXXXXXXXXXXXXX

SEQ ID NO: 73 - protein, 109 aa, Artificial Sequence
  Designed; as detailed elsewhere in present application
  MISC_FEATURE (3)..(3): Xaa at this position is a single (one, 1) amino acid selected from the following options: Val Gly Ala Thr
  MISC_FEATURE (4)..(4): Xaa at this position is a single (one, 1) amino acid selected from the following options: Thr Ser Pro
  MISC_FEATURE (5)..(5): Xaa at this position is a single (one, 1) amino acid selected from the following options: Ala Val Glu
  MISC_FEATURE (6)..(6): Xaa at this position is a single (one, 1) amino acid selected from the following options: Leu Thr Gln
  MISC_FEATURE (7)..(7): Xaa at this position is a single (one, 1) amino acid selected from the following options: Ala Val
  MISC_FEATURE (8)..(8): Xaa at this position is a single (one, 1) amino acid selected from the following options: Ala Val Leu Ile Thr
  MISC_FEATURE (9)..(9): Xaa at this position is a single (one, 1) amino acid selected from the following options: Arg Gln Trp
  MISC_FEATURE (10)..(10): Xaa at this position is a single (one, 1) amino acid selected from the following options: Thr Val Met Ala Ser Leu
  MISC_FEATURE (11)..(11): Xaa at this position is a single (one, 1) amino acid selected from the following options: Trp Arg Gln
  MISC_FEATURE (12)..(12): Xaa at this position is a single (one, 1) amino acid selected from the following options: Leu Phe Gln
  MISC_FEATURE (13)..(13): Xaa at this position is a single (one, 1) amino acid selected from the following options: Gly Tyr Cys Ala Arg
  MISC_FEATURE (14)..(14): Xaa at this position is a single (one, 1) amino acid selected from the following options: Val Ser Ala Thr Met Arg
  MISC_FEATURE (15)..(15): Xaa at this position is a single (one, 1) amino acid selected from the following options: Trp Leu
  MISC_FEATURE (16)..(16): Xaa at this position is a single (one, 1) amino acid selected from the following options: Gly Ser
  MISC_FEATURE (17)..(17): Xaa at this position is a single (one, 1) amino acid selected from the following options: Val Ala Met
  MISC_FEATURE (18)..(18): Xaa at this position is a single (one, 1) amino acid selected from the following options: Arg Trp Lys Leu
  MISC_FEATURE (19)..(19): Xaa at this position is a single (one, 1) amino acid selected from the following options: Thr Ala Val Ser
  MISC_FEATURE (20)..(20): Xaa at this position is a single (one, 1) amino acid selected from the following options: Met Leu Ile Arg Val Ala Thr
  MISC_FEATURE (21)..(21): Xaa at this position is a single (one, 1) amino acid selected from the following options: Gln Arg
  MISC_FEATURE (22)..(22): Xaa at this position is a single (one, 1) amino acid selected from the following options: Ala Thr Gly Ser
  MISC_FEATURE (23)..(23): Xaa at this position is a single (one, 1) amino acid selected from the following options: Arg Gln Gly Leu
  MISC_FEATURE (24)..(24): Xaa at this position is a single (one, 1) amino acid selected from the following options: Gly Ser
  MISC_FEATURE (25)..(25): Xaa at this position is a single (one, 1) amino acid selected from the following options: Phe Tyr
  MISC_FEATURE (26)..(26): Xaa at this position is a single (one, 1) amino acid selected from the following options: Gly Ser Val Ala Thr
  MISC_FEATURE (27)..(27): Xaa at this position is a single (one, 1) amino acid selected from the following options: Ser Cys Arg
  MISC_FEATURE (28)..(28): Xaa at this position is a single (one, 1) amino acid selected from the following options: Asp Glu Gly Ser
  MISC_FEATURE (29)..(29): Xaa at this position is a single (one, 1) amino acid selected from the following options: Gln Arg Ser Thr Lys Pro
  MISC_FEATURE (30)..(30): Xaa at this position is a single (one, 1) amino acid selected from the following options: Ser Pro Ala Gly
  MISC_FEATURE (31)..(31): Xaa at this position is a single (one, 1) amino acid selected from the following options: Glu Asp Lys His Ala Gly Asn
  MISC_FEATURE (32)..(32): Xaa at this position is a single (one, 1) amino acid selected from the following options: Asn Asp Tyr Ser Gly Arg His
  MISC_FEATURE (33)..(33): Xaa at this position is a single (one, 1) amino acid selected from the following options: Val Leu Pro His Met Ile Phe Thr Gly
  MISC_FEATURE (34)..(34): Xaa at this position is a single (one, 1) amino acid selected from the following options: Asp Gly His Arg Ser Glu
  MISC_FEATURE (35)..(35): Xaa at this position is a single (one, 1) amino acid selected from the following options: Arg Ser Gly Thr Pro Ala
  MISC_FEATURE (36)..(36): Xaa at this position is a single (one, 1) amino acid selected from the following options: Gly Ser Arg Pro Lys Asp Arg Thr
  MISC_FEATURE (37)..(37): Xaa at this position is a single (one, 1) amino acid selected from the following options: Ala Glu Ser Glu
  MISC_FEATURE (38)..(38): Xaa at this position is a single (one, 1) amino acid selected from the following options: Gly Ala
  MISC_FEATURE (40)..(40): Xaa at this position is a single (one, 1) amino acid selected from the following options: Ile Val
  MISC_FEATURE (41)..(41): Xaa at this position is a single (one, 1) amino acid selected from the following options: Arg Lys Trp
  MISC_FEATURE (42)..(42): Xaa at this position is a single (one, 1) amino acid selected from the following options: Glu Asp Asn
  MISC_FEATURE (45)..(45): Xaa at this position is a single (one, 1) amino acid selected from the following options: Gly Val
  MISC_FEATURE (46)..(46): Xaa at this position is a single (one, 1) amino acid selected from the following options: Ala Ser Asp
  MISC_FEATURE (48)..(48): Xaa at this position is a single (one, 1) amino acid selected from the following options: Gly Ala Arg
  MISC_FEATURE (49)..(49): Xaa at this position is a single (one, 1) amino acid selected from the following options: Lys Arg
  MISC_FEATURE (50)..(50): Xaa at this position is a single (one, 1) amino acid selected from the following options: Arg Lys
  MISC_FEATURE (51)..(51): Xaa at this position is a single (one, 1) amino acid selected from the following options: Gly Pro Ala Val Leu Ile Met Cys Phe Tyr Trp His Lys Arg Gln Asn Glu Asp Ser Thr
  MISC_FEATURE (52)..(52): Xaa at this position is a single (one, 1) amino acid selected from the following options: Gln Ala Lys Arg
  MISC_FEATURE (53)..(53): Xaa at this position is a single (one, 1) amino acid selected from the following options: Ala Ser
  MISC_FEATURE (54)..(54): Xaa at this position is a single (one, 1) amino acid selected from the following options: Glu Asp Lys
  MISC_FEATURE (55)..(55): Xaa at this position is a single (one, 1) amino acid selected from the following options: Glu Gly
  MISC_FEATURE (56)..(56): Xaa at this position is a single (one, 1) amino acid selected from the following options: Glu Asp
  MISC_FEATURE (59)..(59): Xaa at this position is a single (one, 1) amino acid selected from the following options: Phe Leu
  MISC_FEATURE (60)..(60): Xaa at this position is a single (one, 1) amino acid selected from the following options: Arg Leu
  MISC_FEATURE (61)..(61): Xaa at this position is a single (one, 1) amino acid selected from the following options: Ala Lys Glu Thr
  MISC_FEATURE (62)..(62): Xaa at this position is a single (one, 1) amino acid selected from the following options: Gln Arg Lys
  MISC_FEATURE (63)..(63): Xaa at this position is a single (one, 1) amino acid selected from the following options: Ser Thr Ala Asn
  MISC_FEATURE (64)..(64): Xaa at this position is a single (one, 1) amino acid selected from the following options: Arg Lys
  MISC_FEATURE (65)..(65): Xaa at this position is a single (one, 1) amino acid selected from the following options: Glu Gln
  MISC_FEATURE (68)..(68): Xaa at this position is a single (one, 1) amino acid selected from the following options: Ala Leu Glu Thr
  MISC_FEATURE (69)..(69): Xaa at this position is a single (one, 1) amino acid selected from the following options: Ala Thr Arg Ile
  MISC_FEATURE (71)..(71): Xaa at this position is a single (one, 1) amino acid selected from the following options: Lys Arg
  MISC_FEATURE (73)..(73): Xaa at this position is a single (one, 1) amino acid selected from the following options: Gly Pro Ala Val Leu Ile Met Cys Phe Tyr Trp His Lys Arg Gln Asn Glu Asp Ser Thr
  MISC_FEATURE (74)..(74): Xaa at this position is a single (one, 1) amino acid selected from the following options: Gly Pro Ala Val Leu Ile Met Cys Phe Tyr Trp His Lys Arg Gln Asn Glu Asp Ser Thr
  MISC_FEATURE (76)..(76): Xaa at this position is a single (one, 1) amino acid selected from the following options: Glu Asp Asn
  MISC_FEATURE (78)..(78): Xaa at this position is a single (one, 1) amino acid selected from the following options: Ile Val
  MISC_FEATURE (79)..(79): Xaa at this position is a single (one, 1) amino acid selected from the following options: Val Thr Ser Asp Asn Gly Ala Glu Gln
  MISC_FEATURE (80)..(80): Xaa at this position is a single (one, 1) amino acid selected from the following options: Gly Pro Ala Val Leu Ile Met Cys Phe Tyr Trp His Lys Arg Gln Asn Glu Asp Ser Thr
  MISC_FEATURE (81)..(81): Xaa at this position is a single (one, 1) amino acid selected from the following options: Gly Pro Ala Val Leu Ile Met Cys Phe Tyr Trp His Lys Arg Gln Asn Glu Asp Ser Thr
  MISC_FEATURE (82)..(82): Xaa at this position is a single (one, 1) amino acid selected from the following options: Lys Ser Met Val His Ala Arg Gln Glu
  MISC_FEATURE (83)..(83): Xaa at this position is a single (one, 1) amino acid selected from the following options: Lys Glu Gln Arg
  MISC_FEATURE (86)..(86): Xaa at this position is a single (one, 1) amino acid selected from the following options: Glu Lys
  MISC_FEATURE (87)..(87): Xaa at this position is a single (one, 1) amino acid selected from the following options: Arg His
  MISC_FEATURE (90)..(90): Xaa at this position is a single (one, 1) amino acid selected from the following options: Lys Asn
  MISC_FEATURE (91)..(91): Xaa at this position is a single (one, 1) amino acid selected from the following options: Glu Gln
  MISC_FEATURE (93)..(93): Xaa at this position is a single (one, 1) amino acid selected from the following options: Glu Gln
  MISC_FEATURE (94)..(94): Xaa at this position is a single (one, 1) amino acid selected from the following options: Arg Gln
  MISC_FEATURE (96)..(96): Xaa at this position is a single (one, 1) amino acid selected from the following options: Lys Gln
  MISC_FEATURE (97)..(97): Xaa at this position is a single (one, 1) amino acid selected from the following options: Gln Lys Glu
  MISC_FEATURE (98)..(98): Xaa at this position is a single (one, 1) amino acid selected from the following options: Lys Arg Ser Ala Asn Thr
  MISC_FEATURE (99)..(99): Xaa at this position is a single (one, 1) amino acid selected from the following options: Ile Met
  MISC_FEATURE (100)..(100): Xaa at this position is a single (one, 1) amino acid selected from the following options: Lys Gln
  MISC_FEATURE (101)..(101): Xaa at this position is a single (one, 1) amino acid selected from the following options: Met Thr Lys His Tyr Ser Gln Ile Val Asn
  MISC_FEATURE (103)..(103): Xaa at this position is a single (one, 1) amino acid selected from the following options: Lys Asn Ser His
  MISC_FEATURE (104)..(104): Xaa at this position is a single (one, 1) amino acid selected from the following options: His Asp Asn Ser Arg Gln Glu Tyr
  MISC_FEATURE (105)..(105): Xaa at this position is a single (one, 1) amino acid selected from the following options: Asp His Ser Asn Ile
  MISC_FEATURE (106)..(106): Xaa at this position is a single (one, 1) amino acid selected from the following options: Asp Glu His Gly or is absent (no amino acid at this position and so this position is not present)
  MISC_FEATURE (107)..(107): Xaa at this position is a single (one, 1) amino acid selected from the following options: Asp His or is absent (no amino acid at this position and so this position is not present)
  MISC_FEATURE (108)..(108): Xaa at this position is a single (one, 1) amino acid selected from the following options: Asp or is absent (no amino acid at this position and so this position is not present)
  MISC_FEATURE (109)..(109): Xaa at this position is a single (one, 1) amino acid selected from the following options: Asp or is absent (no amino acid at this position and so this position is not present)
MAXXXXXXXXXXXXXXXXXXXXXXXXXXXXXXXXXXXXAXXXAGXXFXXXXXXXXXRYXXXXXXXQLXXLXKXXEXEXXXXXXEIXXLQXXIXXHXXXXXXLXXXXXXX

SEQ ID NO: 74 - protein, 109 aa, Artificial Sequence
  Designed; as detailed elsewhere in present application
  MISC_FEATURE (3)..(3): Xaa at this position is a single (one, 1) amino acid selected from the following options: Val Ala
  MISC_FEATURE (7)..(7): Xaa at this position is a single (one, 1) amino acid selected from the following options: Ala Val
  MISC_FEATURE (11)..(11): Xaa at this position is a single (one, 1) amino acid selected from the following options: Trp Arg
  MISC_FEATURE (12)..(12): Xaa at this position is a single (one, 1) amino acid selected from the following options: Leu Phe
  MISC_FEATURE (16)..(16): Xaa at this position is a single (one, 1) amino acid selected from the following options: Gly Ser
  MISC_FEATURE (18)..(18): Xaa at this position is a single (one, 1) amino acid selected from the following options: Arg Trp
  MISC_FEATURE (19)..(19): Xaa at this position is a single (one, 1) amino acid selected from the following options: Thr Ala
  MISC_FEATURE (22)..(22): Xaa at this position is a single (one, 1) amino acid selected from the following options: Ala Gly
  MISC_FEATURE (28)..(28): Xaa at this position is a single (one, 1) amino acid selected from the following options: Asp Glu
  MISC_FEATURE (29)..(29): Xaa at this position is a single (one, 1) amino acid selected from the following options: Gln Ser
  MISC_FEATURE (30)..(30): Xaa at this position is a single (one, 1) amino acid selected from the following options: Ser Ala
  MISC_FEATURE (31)..(31): Xaa at this position is a single (one, 1) amino acid selected from the following options: Glu Asp
  MISC_FEATURE (33)..(33): Xaa at this position is a single (one, 1) amino acid selected from the following options: Val Leu
  MISC_FEATURE (34)..(34): Xaa at this position is a single (one, 1) amino acid selected from the following options: Asp Gly
  MISC_FEATURE (35)..(35): Xaa at this position is a single (one, 1) amino acid selected from the following options: Arg Ser
  MISC_FEATURE (36)..(36): Xaa at this position is a single (one, 1) amino acid selected from the following options: Gly Ser
  MISC_FEATURE (40)..(40): Xaa at this position is a single (one, 1) amino acid selected from the following options: Ile Val
  MISC_FEATURE (42)..(42): Xaa at this position is a single (one, 1) amino acid selected from the following options: Glu Asp
  MISC_FEATURE (50)..(50): Xaa at this position is a single (one, 1) amino acid selected from the following options: Arg Lys
  MISC_FEATURE (51)..(51): Xaa at this position is a single (one, 1) amino acid selected from the following options: Gly Pro Ala Val Leu Ile Met Cys Phe Tyr Trp His Lys Arg Gln Asn Glu Asp Ser Thr
  MISC_FEATURE (54)..(54): Xaa at this position is a single (one, 1) amino acid selected from the following options: Glu Asp
  MISC_FEATURE (56)..(56): Xaa at this position is a single (one, 1) amino acid selected from the following options: Glu Asp
  MISC_FEATURE (62)..(62): Xaa at this position is a single (one, 1) amino acid selected from the following options: Gln Arg
  MISC_FEATURE (63)..(63): Xaa at this position is a single (one, 1) amino acid selected from the following options: Ser Thr Ala
  MISC_FEATURE (64)..(64): Xaa at this position is a single (one, 1) amino acid selected from the following options: Arg Lys
  MISC_FEATURE (71)..(71): Xaa at this position is a single (one, 1) amino acid selected from the following options: Lys Arg
  MISC_FEATURE (73)..(73): Xaa at this position is a single (one, 1) amino acid selected from the following options: Gly Pro Ala Val Leu Ile Met Cys Phe Tyr Trp His Lys Arg Gln Asn Glu Asp Ser Thr
  MISC_FEATURE (74)..(74): Xaa at this position is a single (one, 1) amino acid selected from the following options: Gly Pro Ala Val Leu Ile Met Cys Phe Tyr Trp His Lys Arg Gln Asn Glu Asp Ser Thr
  MISC_FEATURE (76)..(76): Xaa at this position is a single (one, 1) amino acid selected from the following options: Glu Asp Asn
  MISC_FEATURE (79)..(79): Xaa at this position is a single (one, 1) amino acid selected from the following options: Val Ser
  MISC_FEATURE (80)..(80): Xaa at this position is a single (one, 1) amino acid selected from the following options: Gly Pro Ala Val Leu Ile Met Cys Phe Tyr Trp His Lys Arg Gln Asn Glu Asp Ser Thr
  MISC_FEATURE (81)..(81): Xaa at this position is a single (one, 1) amino acid selected from the following options: Gly Pro Ala Val Leu Ile Met Cys Phe Tyr Trp His Lys Arg Gln Asn Glu Asp Ser Thr
  MISC_FEATURE (82)..(82): Xaa at this position is a single (one, 1) amino acid selected from the following options: Lys Val Met
  MISC_FEATURE (87)..(87): Xaa at this position is a single (one, 1) amino acid selected from the following options: Arg His
  MISC_FEATURE (91)..(91): Xaa at this position is a single (one, 1) amino acid selected from the following options: Glu Gln
  MISC_FEATURE (98)..(98): Xaa at this position is a single (one, 1) amino acid selected from the following options: Lys Ser
  MISC_FEATURE (101)..(101): Xaa at this position is a single (one, 1) amino acid selected from the following options: Met Thr Lys
  MISC_FEATURE (106)..(106): Asp or is absent (no amino acid at this position and so this position is not present)
  MISC_FEATURE (107)..(107): Asp or is absent (no amino acid at this position and so this position is not present)
  MISC_FEATURE (108)..(108): Asp or is absent (no amino acid at this position and so this position is not present)
  MISC_FEATURE (109)..(109): Asp or is absent (no amino acid at this position and so this position is not present)
MAXTALXARTXXGVWXVXXMQXRGFGSXXXXNXXXXAGAXRXAGGAFGKXXQAXEXRYFRAXXXEQLAALXKXXEXEIXXXXKEIEXLQKXIERHKQXIKXLKHDXXXX

SEQ ID NO: 75 - protein, 107 aa, Artificial Sequence
  Designed; as detailed elsewhere in present application
  misc_feature (3)..(3): Xaa at this position is a single (one, 1) amino acid selected from the following options: Ala Thr Val
  misc_feature (4)..(4): Xaa at this position is a single (one, 1) amino acid selected from the following options: Thr Ser
  misc_feature (5)..(5): Xaa at this position is a single (one, 1) amino acid selected from the following options: Ala Glu
  misc_feature (7)..(7): Xaa at this position is a single (one, 1) amino acid selected from the following options: Ala Val
  misc_feature (9)..(9): Xaa at this position is a single (one, 1) amino acid selected from the following options: Arg Trp
  misc_feature (10)..(10): Xaa at this position is a single (one, 1) amino acid selected from the following options: Thr Met
  misc_feature (11)..(11): Xaa at this position is a single (one, 1) amino acid selected from the following options: Arg Gln Trp
  misc_feature (12)..(12): Xaa at this position is a single (one, 1) amino acid selected from the following options: Phe Leu
  misc_feature (13)..(13): Xaa at this position is a single (one, 1) amino acid selected from the following options: Gly Arg Tyr Cys
  misc_feature (14)..(14): Xaa at this position is a single (one, 1) amino acid selected from the following options: Val Ser Ala Met
  misc_feature (15)..(15): Xaa at this position is a single (one, 1) amino acid selected from the following options: Trp Leu
  misc_feature (16)..(16): Xaa at this position is a single (one, 1) amino acid selected from the following options: Ser Gly
  misc_feature (17)..(17): Xaa at this position is a single (one, 1) amino acid selected from the following options: Val Ala
  misc_feature (18)..(18): Xaa at this position is a single (one, 1) amino acid selected from the following options: Trp Arg
  misc_feature (19)..(19): Xaa at this position is a single (one, 1) amino acid selected from the following options: Ala Thr Val
  misc_feature (20)..(20): Xaa at this position is a single (one, 1) amino acid selected from the following options: Met Val Arg
  misc_feature (22)..(22): Xaa at this position is a single (one, 1) amino acid selected from the following options: Gly Ala Thr
  misc_feature (23)..(23): Xaa at this position is a single (one, 1) amino acid selected from the following options: Arg Leu Gln
  misc_feature (24)..(24): Xaa at this position is a single (one, 1) amino acid selected from the following options: Gly Ser
  misc_feature (26)..(26): Xaa at this position is a single (one, 1) amino acid selected from the following options: Gly Ser
  misc_feature (28)..(28): Xaa at this position is a single (one, 1) amino acid selected from the following options: Glu Asp
  misc_feature (29)..(29): Xaa at this position is a single (one, 1) amino acid selected from the following options: Ser Gln Pro
  misc_feature (30)..(30): Xaa at this position is a single (one, 1) amino acid selected from the following options: Ala Ser Pro
  misc_feature (31)..(31): Xaa at this position is a single (one, 1) amino acid selected from the following options: Asp Glu His
  misc_feature (32)..(32): Xaa at this position is a single (one, 1) amino acid selected from the following options: Asn Asp
  misc_feature (33)..(33): Xaa at this position is a single (one, 1) amino acid selected from the following options: Leu Val
  misc_feature (34)..(34): Xaa at this position is a single (one, 1) amino acid selected from the following options: Gly Asp Arg
  misc_feature (35)..(35): Xaa at this position is a single (one, 1) amino acid selected from the following options: Ser Arg
  misc_feature (36)..(36): Xaa at this position is a single (one, 1) amino acid selected from the following options: Ser Gly Thr Arg
  misc_feature (37)..(37): Xaa at this position is a single (one, 1) amino acid selected from the following options: Ala Glu Ser
  misc_feature (38)..(38): Xaa at this position is a single (one, 1) amino acid selected from the following options: Gly Ala
  misc_feature (40)..(40): Xaa at this position is a single (one, 1) amino acid selected from the following options: Ile Val
  misc_feature (41)..(41): Xaa at this position is a single (one, 1) amino acid selected from the following options: Arg Trp
  misc_feature (42)..(42): Xaa at this position is a single (one, 1) amino acid selected from the following options: Asp Asn Glu
  misc_feature (45)..(45): Xaa at this position is a single (one, 1) amino acid selected from the following options: Gly Val
  misc_feature (46)..(46): Xaa at this position is a single (one, 1) amino acid selected from the following options: Ala Asp
  misc_feature (48)..(48): Xaa at this position is a single (one, 1) amino acid selected from the following options: Gly Arg Ala
  misc_feature (50)..(50): Xaa at this position is a single (one, 1) amino acid selected from the following options: Lys Arg
  misc_feature (51)..(51): Xaa at this position is a single (one, 1) amino acid selected from the following options: Gly Pro Ala Val Leu Ile Met Cys Phe Tyr Trp His Lys Arg Gln Asn Glu Asp Ser Thr
  misc_feature (52)..(52): Xaa at this position is a single (one, 1) amino acid selected from the following options: Gln Ala
  misc_feature (54)..(54): Xaa at this position is a single (one, 1) amino acid selected from the following options: Glu Lys
  misc_feature (55)..(55): Xaa at this position is a single (one, 1) amino acid selected from the following options: Glu Gly
  misc_feature (59)..(59): Xaa at this position is a single (one, 1) amino acid selected from the following options: Phe Leu
  misc_feature (62)..(62): Xaa at this position is a single (one, 1) amino acid selected from the following options: Arg Gln
  misc_feature (63)..(63): Xaa at this position is a single (one, 1) amino acid selected from the following options: Ala Ser Thr
  misc_feature (64)..(64): Xaa at this position is a single (one, 1) amino acid selected from the following options: Lys Arg
  misc_feature (68)..(68): Xaa at this position is a single (one, 1) amino acid selected from the following options: Ala Thr
  misc_feature (69)..(69): Xaa at this position is a single (one, 1) amino acid selected from the following options: Ala Thr
  misc_feature (73)..(73): Xaa at this position is a single (one, 1) amino acid selected from the following options: Gly Pro Ala Val Leu Ile Met Cys Phe Tyr Trp His Lys Arg Gln Asn Glu Asp Ser Thr
  misc_feature (74)..(74): Xaa at this position is a single (one, 1) amino acid selected from the following options: Gly Pro Ala Val Leu Ile Met Cys Phe Tyr Trp His Lys Arg Gln Asn Glu Asp Ser Thr
  misc_feature (76)..(76): Xaa at this position is a single (one, 1) amino acid selected from the following options: Asn Glu Asp
  misc_feature (79)..(79): Xaa at this position is a single (one, 1) amino acid selected from the following options: Ser Thr Gly Val
  misc_feature (80)..(80): Xaa at this position is a single (one, 1) amino acid selected from the following options: Gly Pro Ala Val Leu Ile Met Cys Phe Tyr Trp His Lys Arg Gln Asn Glu Asp Ser Thr
  misc_feature (81)..(81): Xaa at this position is a single (one, 1) amino acid selected from the following options: Gly Pro Ala Val Leu Ile Met Cys Phe Tyr Trp His Lys Arg Gln Asn Glu Asp Ser Thr
  misc_feature (82)..(82): Xaa at this position is a single (one, 1) amino acid selected from the following options: Val Met Lys Glu
  misc_feature (87)..(87): Xaa at this position is a single (one, 1) amino acid selected from the following options: His Arg
  misc_feature (90)..(90): Xaa at this position is a single (one, 1) amino acid selected from the following options: Lys Asn
  misc_feature (98)..(98): Xaa at this position is a single (one, 1) amino acid selected from the following options: Ser Lys
  misc_feature (101)..(101): Xaa at this position is a single (one, 1) amino acid selected from the following options: Lys Met Ile Thr
  misc_feature (104)..(104): Xaa at this position is a single (one, 1) amino acid selected from the following options: His Gln Arg Asp
  misc_feature (105)..(105): Xaa at this position is a single (one, 1) amino acid selected from the following options: Asp Asn
  misc_feature (107)..(107): Asp or is absent (no amino acid at this position and so this position is not present)
MAXXXLXAXXXXXXXXXXXXQXXXFXSXXXXXXXXXXXAXXXAGXXFXKXXXAXXERYXRAXXXEQLXXLKKXXEXEIXXXXKEIEXLQXEIERHKQXIKXLKXXDX

SEQ ID NO: 76 - protein, 107 aa, Artificial Sequence
  Designed; as detailed elsewhere in present application
  MISC_FEATURE (11)..(11): Xaa at this position is a single (one, 1) amino acid selected from the following options: Arg Trp
  MISC_FEATURE (12)..(12): Xaa at this position is a single (one, 1) amino acid selected from the following options: Phe Leu
  MISC_FEATURE (16)..(16): Xaa at this position is a single (one, 1) amino acid selected from the following options: Ser Gly
  MISC_FEATURE (18)..(18): Xaa at this position is a single (one, 1) amino acid selected from the following options: Trp Arg
  MISC_FEATURE (19)..(19): Xaa at this position is a single (one, 1) amino acid selected from the following options: Ala Thr
  MISC_FEATURE (22)..(22): Xaa at this position is a single (one, 1) amino acid selected from the following options: Gly Ala
  MISC_FEATURE (28)..(28): Xaa at this position is a single (one, 1) amino acid selected from the following options: Glu Asp
  MISC_FEATURE (29)..(29): Xaa at this position is a single (one, 1) amino acid selected from the following options: Ser Gln
  MISC_FEATURE (30)..(30): Xaa at this position is a single (one, 1) amino acid selected from the following options: Ala Ser
  MISC_FEATURE (31)..(31): Xaa at this position is a single (one, 1) amino acid selected from the following options: Asp Glu
  MISC_FEATURE (34)..(34): Xaa at this position is a single (one, 1) amino acid selected from the following options: Gly Asp
  MISC_FEATURE (35)..(35): Xaa at this position is a single (one, 1) amino acid selected from the following options: Ser Arg
  MISC_FEATURE (36)..(36): Xaa at this position is a single (one, 1) amino acid selected from the following options: Ser Gly
  MISC_FEATURE (40)..(40): Xaa at this position is a single (one, 1) amino acid selected from the following options: Ile Val
  MISC_FEATURE (42)..(42): Xaa at this position is a single (one, 1) amino acid selected from the following options: Asp Glu
  MISC_FEATURE (50)..(50): Xaa at this position is a single (one, 1) amino acid selected from the following options: Lys Arg
  MISC_FEATURE (51)..(51): Xaa at this position is a single (one, 1) amino acid selected from the following options: Gly Pro Ala Val Leu Ile Met Cys Phe Tyr Trp His Lys Arg Gln Asn Glu Asp Ser Thr
  MISC_FEATURE (62)..(62): Xaa at this position is a single (one, 1) amino acid selected from the following options: Arg Gln
  MISC_FEATURE (64)..(64): Xaa at this position is a single (one, 1) amino acid selected from the following options: Lys Arg
  MISC_FEATURE (73)..(73): Xaa at this position is a single (one, 1) amino acid selected from the following options: Gly Pro Ala Val Leu Ile Met Cys Phe Tyr Trp His Lys Arg Gln Asn Glu Asp Ser Thr
  MISC_FEATURE (74)..(74): Xaa at this position is a single (one, 1) amino acid selected from the following options: Gly Pro Ala Val Leu Ile Met Cys Phe Tyr Trp His Lys Arg Gln Asn Glu Asp Ser Thr
  MISC_FEATURE (76)..(76): Xaa at this position is a single (one, 1) amino acid selected from the following options: Asn Glu Asp
  MISC_FEATURE (79)..(79): Xaa at this position is a single (one, 1) amino acid selected from the following options: Ser Val
  MISC_FEATURE (80)..(80): Xaa at this position is a single (one, 1) amino acid selected from the following options: Gly Pro Ala Val Leu Ile Met Cys Phe Tyr Trp His Lys Arg Gln Asn Glu Asp Ser Thr
  MISC_FEATURE (81)..(81): Xaa at this position is a single (one, 1) amino acid selected from the following options: Gly Pro Ala Val Leu Ile Met Cys Phe Tyr Trp His Lys Arg Gln Asn Glu Asp Ser Thr
  MISC_FEATURE (82)..(82): Xaa at this position is a single (one, 1) amino acid selected from the following options: Val Met Lys
  MISC_FEATURE (87)..(87): Xaa at this position is a single (one, 1) amino acid selected from the following options: His Arg
  MISC_FEATURE (98)..(98): Xaa at this position is a single (one, 1) amino acid selected from the following options: Ser Lys
MAATALAARTXXGVWXVXXMQXRGFGSXXXXNLXXXAGAXRXAGGAFGKXXQAEEERYFRAXAXEQLAALKKXXEXEIXXXXKEIEXLQKEIERHKQXIKKLKHDDD

SEQ ID NO: 77 - protein, 108 aa, Artificial Sequence
  Designed; as detailed elsewhere in present application
  MISC_FEATURE (3)..(3): Xaa at this position is a single (one, 1) amino acid selected from the following options: Val Ala Thr
  MISC_FEATURE (4)..(4): Xaa at this position is a single (one, 1) amino acid selected from the following options: Thr Val
  MISC_FEATURE (5)..(5): Xaa at this position is a single (one, 1) amino acid selected from the following options: Ala Glu
  MISC_FEATURE (7)..(7): Xaa at this position is a single (one, 1) amino acid selected from the following options: Ala Val
  MISC_FEATURE (9)..(9): Xaa at this position is a single (one, 1) amino acid selected from the following options: Arg Trp
  MISC_FEATURE (10)..(10): Xaa at this position is a single (one, 1) amino acid selected from the following options: Thr Met Val
  MISC_FEATURE (11)..(11): Xaa at this position is a single (one, 1) amino acid selected from the following options: Arg Trp Gln
  MISC_FEATURE (12)..(12): Xaa at this position is a single (one, 1) amino acid selected from the following options: Leu Phe
  MISC_FEATURE (13)..(13): Xaa at this position is a single (one, 1) amino acid selected from the following options: Gly Arg Tyr Cys
  MISC_FEATURE (14)..(14): Xaa at this position is a single (one, 1) amino acid selected from the following options: Val Ser Ala
  MISC_FEATURE (15)..(15): Xaa at this position is a single (one, 1) amino acid selected from the following options: Trp Leu
  MISC_FEATURE (16)..(16): Xaa at this position is a single (one, 1) amino acid selected from the following options: Gly Ser
  MISC_FEATURE (17)..(17): Xaa at this position is a single (one, 1) amino acid selected from the following options: Val Ala
  MISC_FEATURE (18)..(18): Xaa at this position is a single (one, 1) amino acid selected from the following options: Trp Arg
  MISC_FEATURE (19)..(19): Xaa at this position is a single (one, 1) amino acid selected from the following options: Ala Thr Val
  MISC_FEATURE (20)..(20): Xaa at this position is a single (one, 1) amino acid selected from the following options: Met Val
  MISC_FEATURE (22)..(22): Xaa at this position is a single (one, 1) amino acid selected from the following options: Gly Ala
  MISC_FEATURE (23)..(23): Xaa at this position is a single (one, 1) amino acid selected from the following options: Arg Gln Leu
  MISC_FEATURE (24)..(24): Xaa at this position is a single (one, 1) amino acid selected from the following options: Gly Met
  MISC_FEATURE (25)..(25): Xaa at this position is a single (one, 1) amino acid selected from the following options: Phe Gln
  MISC_FEATURE (26)..(26): Xaa at this position is a single (one, 1) amino acid selected from the following options: Gly Ser
  MISC_FEATURE (28)..(28): Xaa at this position is a single (one, 1) amino acid selected from the following options: Glu Asp
  MISC_FEATURE (29)..(29): Xaa at this position is a single (one, 1) amino acid selected from the following options: Ser Pro Gln
  MISC_FEATURE (30)..(30): Xaa at this position is a single (one, 1) amino acid selected from the following options: Ala Ser Pro
  MISC_FEATURE (31)..(31): Xaa at this position is a single (one, 1) amino acid selected from the following options: Asp Glu His
  MISC_FEATURE (32)..(32): Xaa at this position is a single (one, 1) amino acid selected from the following options: Asn Asp
  MISC_FEATURE (33)..(33): Xaa at this position is a single (one, 1) amino acid selected from the following options: Leu Val
  MISC_FEATURE (34)..(34): Xaa at this position is a single (one, 1) amino acid selected from the following options: Gly Asp Arg
  MISC_FEATURE (35)..(35): Xaa at this position is a single (one, 1) amino acid selected from the following options: Ser Arg
  MISC_FEATURE (36)..(36): Xaa at this position is a single (one, 1) amino acid selected from the following options: Ser Gly Arg Thr
  MISC_FEATURE (37)..(37): Xaa at this position is a single (one, 1) amino acid selected from the following options: Ala Glu
  MISC_FEATURE (38)..(38): Xaa at this position is a single (one, 1) amino acid selected from the following options: Gly Ala
  MISC_FEATURE (40)..(40): Xaa at this position is a single (one, 1) amino acid selected from the following options: Val Ile
  MISC_FEATURE (41)..(41): Xaa at this position is a single (one, 1) amino acid selected from the following options: Arg Trp
  MISC_FEATURE (42)..(42): Xaa at this position is a single (one, 1) amino acid selected from the following options: Asp Glu Asn
  MISC_FEATURE (45)..(45): Xaa at this position is a single (one, 1) amino acid selected from the following options: Gly Val
  MISC_FEATURE (46)..(46): Xaa at this position is a single (one, 1) amino acid selected from the following options: Ala Asp
  MISC_FEATURE (48)..(48): Xaa at this position is a single (one, 1) amino acid selected from the following options: Gly Arg Ala
  MISC_FEATURE (50)..(50): Xaa at this position is a single (one, 1) amino acid selected from the following options: Arg Lys
  MISC_FEATURE (51)..(51): Xaa at this position is a single (one, 1) amino acid selected from the following options: Gly Pro Ala Val Leu Ile Met Cys Phe Tyr Trp His Lys Arg Gln Asn Glu Asp Ser Thr
  MISC_FEATURE (52)..(52): Xaa at this position is a single (one, 1) amino acid selected from the following options: Gln Ala
  MISC_FEATURE (54)..(54): Xaa at this position is a single (one, 1) amino acid selected from the following options: Glu Lys
  MISC_FEATURE (55)..(55): Xaa at this position is a single (one, 1) amino acid selected from the following options: Glu Gly
  MISC_FEATURE (56)..(56): Xaa at this position is a single (one, 1) amino acid selected from the following options: Glu Gln
  MISC_FEATURE (59)..(59): Xaa at this position is a single (one, 1) amino acid selected from the following options: Phe Leu
  MISC_FEATURE (62)..(62): Xaa at this position is a single (one, 1) amino acid selected from the following options: Arg Gln Cys
  MISC_FEATURE (63)..(63): Xaa at this position is a single (one, 1) amino acid selected from the following options: Ala Ser
  MISC_FEATURE (64)..(64): Xaa at this position is a single (one, 1) amino acid selected from the following options: Lys Arg
  MISC_FEATURE (69)..(69): Xaa at this position is a single (one, 1) amino acid selected from the following options: Ala Thr
  MISC_FEATURE (73)..(73): Xaa at this position is a single (one, 1) amino acid selected from the following options: Gly Pro Ala Val Leu Ile Met Cys Phe Tyr Trp His Lys Arg Gln Asn Glu Asp Ser Thr
  MISC_FEATURE (74)..(74): Xaa at this position is a single (one, 1) amino acid selected from the following options: Gly Pro Ala Val Leu Ile Met Cys Phe Tyr Trp His Lys Arg Gln Asn Glu Asp Ser Thr
  MISC_FEATURE (76)..(76): Xaa at this position is a single (one, 1) amino acid selected from the following options: Asn Glu
  MISC_FEATURE (79)..(79): Xaa at this position is a single (one, 1) amino acid selected from the following options: Ser Val Thr
  MISC_FEATURE (80)..(80): Xaa at this position is a single (one, 1) amino acid selected from the following options: Gly Pro Ala Val Leu Ile Met Cys Phe Tyr Trp His Lys Arg Gln Asn Glu Asp Ser Thr
  MISC_FEATURE (81)..(81): Xaa at this position is a single (one, 1) amino acid selected from the following options: Gly Pro Ala Val Leu Ile Met Cys Phe Tyr Trp His Lys Arg Gln Asn Glu Asp Ser Thr
  MISC_FEATURE (82)..(82): Xaa at this position is a single (one, 1) amino acid selected from the following options: Val Lys Met Glu
  MISC_FEATURE (87)..(87): Xaa at this position is a single (one, 1) amino acid selected from the following options: His Arg Cys
  MISC_FEATURE (90)..(90): Xaa at this position is a single (one, 1) amino acid selected from the following options: Lys Asn
  MISC_FEATURE (92)..(92): Xaa at this position is a single (one, 1) amino acid selected from the following options: Ile Met
  MISC_FEATURE (94)..(94): Xaa at this position is a single (one, 1) amino acid selected from the following options: Arg Glu
  MISC_FEATURE (98)..(98): Xaa at this position is a single (one, 1) amino acid selected from the following options: Ser Lys Leu
  MISC_FEATURE (99)..(99): Xaa at this position is a single (one, 1) amino acid selected from the following options: Ile Val
  MISC_FEATURE (101)..(101): Xaa at this position is a single (one, 1) amino acid selected from the following options: Lys Met
  MISC_FEATURE (104)..(104): Xaa at this position is a single (one, 1) amino acid selected from the following options: His Gln
  MISC_FEATURE (105)..(105): Xaa at this position is a single (one, 1) amino acid selected from the following options: Asp His
  MISC_FEATURE (107)..(107): Asp or is absent (no amino acid at this position and so this position is not present)
  MISC_FEATURE (108)..(108): Asp or is absent (no amino acid at this position and so this position is not present)
MAXXXLXAXXXXXXXXXXXXQXXXXXSXXXXXXXXXXXAXXXAGXXFXKXXXAXXXRYXRAXXXEQLAXLKKXXEXEIXXXXKEIEXLQXEXEXHKQXXKXLKXXDXX

SEQ ID NO: 78 - protein, 108 aa, Artificial Sequence
  Designed; as detailed elsewhere in present application
  MISC_FEATURE (16)..(16): Xaa at this position is a single (one, 1) amino acid selected from the following options: Gly Ser
  MISC_FEATURE (18)..(18): Xaa at this position is a single (one, 1) amino acid selected from the following options: Trp Arg
  MISC_FEATURE (19)..(19): Xaa at this position is a single (one, 1) amino acid selected from the following options: Ala Thr
  MISC_FEATURE (22)..(22): Xaa at this position is a single (one, 1) amino acid selected from the following options: Gly Ala
  MISC_FEATURE (23)..(23): Xaa at this position is a single (one, 1) amino acid selected from the following options: Arg Gln
  MISC_FEATURE (26)..(26): Xaa at this position is a single (one, 1) amino acid selected from the following options: Gly Ser
  MISC_FEATURE (28)..(28): Xaa at this position is a single (one, 1) amino acid selected from the following options: Glu Asp
  MISC_FEATURE (29)..(29): Xaa at this position is a single (one, 1) amino acid selected from the following options: Ser Gln
  MISC_FEATURE (30)..(30): Xaa at this position is a single (one, 1) amino acid selected from the following options: Ala Ser
  MISC_FEATURE (31)..(31): Xaa at this position is a single (one, 1) amino acid selected from the following options: Asp Glu
  MISC_FEATURE (32)..(32): Xaa at this position is a single (one, 1) amino acid selected from the following options: Asn Asp
  MISC_FEATURE (34)..(34): Xaa at this position is a single (one, 1) amino acid selected from the following options: Gly Asp
  MISC_FEATURE (35)..(35): Xaa at this position is a single (one, 1) amino acid selected from the following options: Ser Arg
  MISC_FEATURE (36)..(36): Xaa at this position is a single (one, 1) amino acid selected from the following options: Ser Gly
  MISC_FEATURE (40)..(40): Xaa at this position is a single (one, 1) amino acid selected from the following options: Val Ile
  MISC_FEATURE (41)..(41): Xaa at this position is a single (one, 1) amino acid selected from the following options: Arg Trp
  MISC_FEATURE (42)..(42): Xaa at this position is a single (one, 1) amino acid selected from the following options: Asp Glu
  MISC_FEATURE (45)..(45): Xaa at this position is a single (one, 1) amino acid selected from the following options: Gly Val
  MISC_FEATURE (46)..(46): Xaa at this position is a single (one, 1) amino acid selected from the following options: Ala Asp
  MISC_FEATURE (48)..(48): Xaa at this position is a single (one, 1) amino acid selected from the following options: Gly Ala
  MISC_FEATURE (50)..(50): Xaa at this position is a single (one, 1) amino acid selected from the following options: Arg Lys
  MISC_FEATURE (51)..(51): Xaa at this position is a single (one, 1) amino acid selected from the following options: Gly Pro Ala Val Leu Ile Met Cys Phe Tyr Trp His Lys Arg Gln Asn Glu Asp Ser Thr
  MISC_FEATURE (52)..(52): Xaa at this position is a single (one, 1) amino acid selected from the following options: Gln Ala
  MISC_FEATURE (54)..(54): Xaa at this position is a single (one, 1) amino acid selected from the following options: Glu Lys
  MISC_FEATURE (55)..(55): Xaa at this position is a single (one, 1) amino acid selected from the following options: Glu Gly
  MISC_FEATURE (56)..(56): Xaa at this position is a single (one, 1) amino acid selected from the following options: Glu Gln
  MISC_FEATURE (59)..(59): Xaa at this position is a single (one, 1) amino acid selected from the following options: Phe Leu
  MISC_FEATURE (62)..(62): Xaa at this position is a single (one, 1) amino acid selected from the following options: Arg Gln
  MISC_FEATURE (63)..(63): Xaa at this position is a single (one, 1) amino acid selected from the following options: Ala Ser
  MISC_FEATURE (64)..(64): Xaa at this position is a single (one, 1) amino acid selected from the following options: Lys Arg
  MISC_FEATURE (73)..(73): Xaa at this position is a single (one, 1) amino acid selected from the following options: Gly Pro Ala Val Leu Ile Met Cys Phe Tyr Trp His Lys Arg Gln Asn Glu Asp Ser Thr
  MISC_FEATURE (74)..(74): Xaa at this position is a single (one, 1) amino acid selected from the following options: Gly Pro Ala Val Leu Ile Met Cys Phe Tyr Trp His Lys Arg Gln Asn Glu Asp Ser Thr
  MISC_FEATURE (76)..(76): Xaa at this position is a single (one, 1) amino acid selected from the following options: Asn Glu
  MISC_FEATURE (79)..(79): Xaa at this position is a single (one, 1) amino acid selected from the following options: Ser Val
  MISC_FEATURE (80)..(80): Xaa at this position is a single (one, 1) amino acid selected from the following options: Gly Pro Ala Val Leu Ile Met Cys Phe Tyr Trp His Lys Arg Gln Asn Glu Asp Ser Thr
  MISC_FEATURE (81)..(81): Xaa at this position is a single (one, 1) amino acid selected from the following options: Gly Pro Ala Val Leu Ile Met Cys Phe Tyr Trp His Lys Arg Gln Asn Glu Asp Ser Thr
  MISC_FEATURE (82)..(82): Xaa at this position is a single (one, 1) amino acid selected from the following options: Val Lys
  MISC_FEATURE (87)..(87): Xaa at this position is a single (one, 1) amino acid selected from the following options: His Arg
  MISC_FEATURE (98)..(98): Xaa at this position is a single (one, 1) amino acid selected from the following options: Ser Lys
  MISC_FEATURE (101)..(101): Xaa at this position is a single (one, 1) amino acid selected from the following options: Lys Met
  MISC_FEATURE (108)..(108): Asp or is absent (no amino acid at this position and so this position is not present)
MAATALAARTRFGVWXVXXMQXXGFXSXXXXXLXXXAGAXXXAGXXFXKXXXAXXXRYXRAXXXEQLAALKKXXEXEIXXXXKEIEXLQKEIERHKQXIKXLKHDDDX

SEQ ID NO: 79 - protein, 107 aa, Artificial Sequence
  Designed; as detailed elsewhere in present application
  MISC_FEATURE (3)..(3): Xaa at this position is a single (one, 1) amino acid selected from the following options: Ala Val
  MISC_FEATURE (4)..(4): Xaa at this position is a single (one, 1) amino acid selected from the following options: Thr Val
  MISC_FEATURE (7)..(7): Xaa at this position is a single (one, 1) amino acid selected from the following options: Ala Val
  MISC_FEATURE (9)..(9): Xaa at this position is a single (one, 1) amino acid selected from the following options: Arg Trp
  MISC_FEATURE (10)..(10): Xaa at this position is a single (one, 1) amino acid selected from the following options: Thr Met
  MISC_FEATURE (11)..(11): Xaa at this position is a single (one, 1) amino acid selected from the following options: Arg Gln Trp
  MISC_FEATURE (12)..(12): Xaa at this position is a single (one, 1) amino acid selected from the following options: Phe Leu
  MISC_FEATURE (13)..(13): Xaa at this position is a single (one, 1) amino acid selected from the following options: Gly Arg
  MISC_FEATURE (16)..(16): Xaa at this position is a single (one, 1) amino acid selected from the following options: Gly Ser
  MISC_FEATURE (18)..(18): Xaa at this position is a single (one, 1) amino acid selected from the following options: Arg Trp
  MISC_FEATURE (19)..(19): Xaa at this position is a single (one, 1) amino acid selected from the following options: Thr Val Ala
  MISC_FEATURE (22)..(22): Xaa at this position is a single (one, 1) amino acid selected from the following options: Gly Ala
  MISC_FEATURE (23)..(23): Xaa at this position is a single (one, 1) amino acid selected from the following options: Arg Leu
  MISC_FEATURE (28)..(28): Xaa at this position is a single (one, 1) amino acid selected from the following options: Glu Asp
  MISC_FEATURE (29)..(29): Xaa at this position is a single (one, 1) amino acid selected from the following options: Ser Pro Gln
  MISC_FEATURE (30)..(30): Xaa at this position is a single (one, 1) amino acid selected from the following options: Ala Ser
  MISC_FEATURE (31)..(31): Xaa at this position is a single (one, 1) amino acid selected from the following options: Asp Glu
  MISC_FEATURE (33)..(33): Xaa at this position is a single (one, 1) amino acid selected from the following options: Leu Val
  MISC_FEATURE (34)..(34): Xaa at this position is a single (one, 1) amino acid selected from the following options: Gly Asp
  MISC_FEATURE (35)..(35): Xaa at this position is a single (one, 1) amino acid selected from the following options: Ser Arg
  MISC_FEATURE (36)..(36): Xaa at this position is a single (one, 1) amino acid selected from the following options: Ser Gly
  MISC_FEATURE (37)..(37): Xaa at this position is a single (one, 1) amino acid selected from the following options: Ala Glu
  MISC_FEATURE (38)..(38): Xaa at this position is a single (one, 1) amino acid selected from the following options: Gly Ala
  MISC_FEATURE (40)..(40): Xaa at this position is a single (one, 1) amino acid selected from the following options: Trp Val Ile
  MISC_FEATURE (41)..(41): Xaa at this position is a single (one, 1) amino acid selected from the following options: Arg Trp
  MISC_FEATURE (42)..(42): Xaa at this position is a single (one, 1) amino acid selected from the following options: Asn Glu Asp
  MISC_FEATURE (45)..(45): Xaa at this position is a single (one, 1) amino acid selected from the following options: Gly Val
  MISC_FEATURE (46)..(46): Xaa at this position is a single (one, 1) amino acid selected from the following options: Ala Asp
  MISC_FEATURE (48)..(48): Xaa at this position is a single (one, 1) amino acid selected from the following options: Gly Arg
  MISC_FEATURE (50)..(50): Xaa at this position is a single (one, 1) amino acid selected from the following options: Lys Arg
  MISC_FEATURE (51)..(51): Xaa at this position is a single (one, 1) amino acid selected from the following options: Gly Pro Ala Val Leu Ile Met Cys Phe Tyr Trp His Lys Arg Gln Asn Glu Asp Ser Thr
  MISC_FEATURE (54)..(54): Xaa at this position is a single (one, 1) amino acid selected from the following options: Glu Lys
  MISC_FEATURE (55)..(55): Xaa at this position is a single (one, 1) amino acid selected from the following options: Glu Gly
  MISC_FEATURE (59)..(59): Xaa at this position is a single (one, 1) amino acid selected from the following options: Phe Leu
  MISC_FEATURE (62)..(62): Xaa at this position is a single (one, 1) amino acid selected from the following options: Arg Gln
  MISC_FEATURE (63)..(63): Xaa at this position is a single (one, 1) amino acid selected from the following options: Ala Ser
  MISC_FEATURE (64)..(64): Xaa at this position is a single (one, 1) amino acid selected from the following options: Lys Arg
  MISC_FEATURE (73)..(73): Xaa at this position is a single (one, 1) amino acid selected from the following options: Gly Pro Ala Val Leu Ile Met Cys Phe Tyr Trp His Lys Arg Gln Asn Glu Asp Ser Thr
  MISC_FEATURE (74)..(74): Xaa at this position is a single (one, 1) amino acid selected from the following options: Gly Pro Ala Val Leu Ile Met Cys Phe Tyr Trp His Lys Arg Gln Asn Glu Asp Ser Thr
  MISC_FEATURE (76)..(76): Xaa at this position is a single (one, 1) amino acid selected from the following options: Asn Glu
  MISC_FEATURE (79)..(79): Xaa at this position is a single (one, 1) amino acid selected from the following options: Ser Val
  MISC_FEATURE (80)..(80): Xaa at this position is a single (one, 1) amino acid selected from the following options: Gly Pro Ala Val Leu Ile Met Cys Phe Tyr Trp His Lys Arg Gln Asn Glu Asp Ser Thr
  MISC_FEATURE (81)..(81): Xaa at this position is a single (one, 1) amino acid selected from the following options: Gly Pro Ala Val Leu Ile Met Cys Phe Tyr Trp His Lys Arg Gln Asn Glu Asp Ser Thr
  MISC_FEATURE (82)..(82): Xaa at this position is a single (one, 1) amino acid selected from the following options: Val Lys
  MISC_FEATURE (87)..(87): Xaa at this position is a single (one, 1) amino acid selected from the following options: Arg His
  MISC_FEATURE (98)..(98): Xaa at this position is a single (one, 1) amino acid selected from the following options: Lys Ser
  MISC_FEATURE (101)..(101): Xaa at this position is a single (one, 1) amino acid selected from the following options: Met Lys
  MISC_FEATURE (107)..(107): Asp or is absent (no amino acid at this position and so this position is not present)
MAXXALXAXXXXXVWXVXXMQXXGFGSXXXXNXXXXXXAXXXAGXXFXKXXQAXXERYXRAXXXEQLAALKKXXEXEIXXXXKEIEXLQKEIERHKQXIKXLKHDDX

SEQ ID NO: 80 - protein, 107 aa, Artificial Sequence
  Designed; as detailed elsewhere in present application
  MISC_FEATURE (51)..(51): Xaa at this position is a single (one, 1) amino acid selected from the following options: Gly Pro Ala Val Leu Ile Met Cys Phe Tyr Trp His Lys Arg Gln Asn Glu Asp Ser Thr
  MISC_FEATURE (73)..(73): Xaa at this position is a single (one, 1) amino acid selected from the following options: Gly Pro Ala Val Leu Ile Met Cys Phe Tyr Trp His Lys Arg Gln Asn Glu Asp Ser Thr
  MISC_FEATURE (74)..(74): Xaa at this position is a single (one, 1) amino acid selected from the following options: Gly Pro Ala Val Leu Ile Met Cys Phe Tyr Trp His Lys Arg Gln Asn Glu Asp Ser Thr
  MISC_FEATURE (80)..(80): Xaa at this position is a single (one, 1) amino acid selected from the following options: Gly Pro Ala Val Leu Ile Met Cys Phe Tyr Trp His Lys Arg Gln Asn Glu Asp Ser Thr
  MISC_FEATURE (81)..(81): Xaa at this position is a single (one, 1) amino acid selected from the following options: Gly Pro Ala Val Leu Ile Met Cys Phe Tyr Trp His Lys Arg Gln Asn Glu Asp Ser Thr
MAATALAARTRFGVWSVWAMQGRGFGSESADNLGSSAGAIRDAGGAFGKKXQAEEERYFRARAKEQLAALKKXXENEISXXVKEIEHLQKEIERHKQSIKKLKHDDD

SEQ ID NO: 81 - protein, 107 aa, Artificial Sequence
  Designed; as detailed elsewhere in present application
  MISC_FEATURE (3)..(3): Xaa at this position is a single (one, 1) amino acid selected from the following options: Val Gly Ala Thr
  MISC_FEATURE (4)..(4): Xaa at this position is a single (one, 1) amino acid selected from the following options: Thr Ser Pro
  MISC_FEATURE (5)..(5): Xaa at this position is a single (one, 1) amino acid selected from the following options: Ala Val Glu
  MISC_FEATURE (6)..(6): Xaa at this position is a single (one, 1) amino acid selected from the following options: Leu Thr Gln
  MISC_FEATURE (7)..(7): Xaa at this position is a single (one, 1) amino acid selected from the following options: Ala Val
  MISC_FEATURE (8)..(8): Xaa at this position is a single (one, 1) amino acid selected from the following options: Ala Val Leu Ile Thr
  MISC_FEATURE (9)..(9): Xaa at this position is a single (one, 1) amino acid selected from the following options: Arg Gln Trp
  MISC_FEATURE (10)..(10): Xaa at this position is a single (one, 1) amino acid selected from the following options: Thr Val Met Ala Ser Leu
  MISC_FEATURE (11)..(11): Xaa at this position is a single (one, 1) amino acid selected from the following options: Trp Arg Gln
  MISC_FEATURE (12)..(12): Xaa at this position is a single (one, 1) amino acid selected from the following options: Leu Phe Gln
  MISC_FEATURE (13)..(13): Xaa at this position is a single (one, 1) amino acid selected from the following options: Gly Tyr Cys Ala Arg
  MISC_FEATURE (14)..(14): Xaa at this position is a single (one, 1) amino acid selected from the following options: Val Ser Ala Thr Met Arg
  MISC_FEATURE (15)..(15): Xaa at this position is a single (one, 1) amino acid selected from the following options: Trp Leu
  MISC_FEATURE (16)..(16): Xaa at this position is a single (one, 1) amino acid selected from the following options: Gly Ser
  MISC_FEATURE (17)..(17): Xaa at this position is a single (one, 1) amino acid selected from the following options: Val Ala Met
  MISC_FEATURE (18)..(18): Xaa at this position is a single (one, 1) amino acid selected from the following options: Arg Trp Lys Leu
  MISC_FEATURE (19)..(19): Xaa at this position is a single (one, 1) amino acid selected from the following options: Thr Ala Val Ser
  MISC_FEATURE (20)..(20): Xaa at this position is a single (one, 1) amino acid selected from the following options: Met Leu Ile Arg Val Ala Thr
  MISC_FEATURE (21)..(21): Xaa at this position is a single (one, 1) amino acid selected from the following options: Gln Arg
  MISC_FEATURE (22)..(22): Xaa at this position is a single (one, 1) amino acid selected from the following options: Ala Thr Gly Ser
  MISC_FEATURE (23)..(23): Xaa at this position is a single (one, 1) amino acid selected from the following options: Arg Gln Gly Leu
  MISC_FEATURE (24)..(24): Xaa at this position is a single (one, 1) amino acid selected from the following options: Gly Ser
  MISC_FEATURE (25)..(25): Xaa at this position is a single (one, 1) amino acid selected from the following options: Phe Tyr
  MISC_FEATURE (51)..(51): Xaa at this position is a single (one, 1) amino acid selected from the following options: Gly Pro Ala Val Leu Ile Met Cys Phe Tyr Trp His Lys Arg Gln Asn Glu Asp Ser Thr
  MISC_FEATURE (73)..(73): Xaa at this position is a single (one, 1) amino acid selected from the following options: Gly Pro Ala Val Leu Ile Met Cys Phe Tyr Trp His Lys Arg Gln Asn Glu Asp Ser Thr
  MISC_FEATURE (74)..(74): Xaa at this position is a single (one, 1) amino acid selected from the following options: Gly Pro Ala Val Leu Ile Met Cys Phe Tyr Trp His Lys Arg Gln Asn Glu Asp Ser Thr
  MISC_FEATURE (80)..(80): Xaa at this position is a single (one, 1) amino acid selected from the following options: Gly Pro Ala Val Leu Ile Met Cys Phe Tyr Trp His Lys Arg Gln Asn Glu Asp Ser Thr
  MISC_FEATURE (81)..(81): Xaa at this position is a single (one, 1) amino acid selected from the following options: Gly Pro Ala Val Leu Ile Met Cys Phe Tyr Trp His Lys Arg Gln Asn Glu Asp Ser Thr
MAXXXXXXXXXXXXXXXXXXXXXXXGSESADNLGSSAGAIRDAGGAFGKKXQAEEERYFRARAKEQLAALKKXXENEISXXVKEIEHLQKEIERHKQSIKKLKHDDD

SEQ ID NO: 82 - protein, 107 aa, Artificial Sequence
  Designed; as detailed elsewhere in present application
  MISC_FEATURE (51)..(51): Xaa at this position is a single (one, 1) amino acid selected from the following options: Gly Pro Ala Val Leu Ile Met Cys Phe Tyr Trp His Lys Arg Gln Asn Glu Asp Ser Thr
  MISC_FEATURE (73)..(73): Xaa at this position is a single (one, 1) amino acid selected from the following options: Gly Pro Ala Val Leu Ile Met Cys Phe Tyr Trp His Lys Arg Gln Asn Glu Asp Ser Thr
  MISC_FEATURE (74)..(74): Xaa at this position is a single (one, 1) amino acid selected from the following options: Gly Pro Ala Val Leu Ile Met Cys Phe Tyr Trp His Lys Arg Gln Asn Glu Asp Ser Thr
  MISC_FEATURE (80)..(80): Xaa at this position is a single (one, 1) amino acid selected from the following options: Gly Pro Ala Val Leu Ile Met Cys Phe Tyr Trp His Lys Arg Gln Asn Glu Asp Ser Thr
  MISC_FEATURE (81)..(81): Xaa at this position is a single (one, 1) amino acid selected from the following options: Gly Pro Ala Val Leu Ile Met Cys Phe Tyr Trp His Lys Arg Gln Asn Glu Asp Ser Thr
MAVTALAARTWLGVWGVRTMQARGFGSESADNLGSSAGAIRDAGGAFGKKXQAEEERYFRARAKEQLAALKKXXENEISXXVKEIEHLQKEIERHKQSIKKLKHDDD

SEQ ID NO: 83 - protein, 107 aa, Artificial Sequence
  Designed; as detailed elsewhere in present application
  MISC_FEATURE (51)..(51): Xaa at this position is a single (one, 1) amino acid selected from the following options: Gly Pro Ala Val Leu Ile Met Cys Phe Tyr Trp His Lys Arg Gln Asn Glu Asp Ser Thr
  MISC_FEATURE (73)..(73): Xaa at this position is a single (one, 1) amino acid selected from the following options: Gly Pro Ala Val Leu Ile Met Cys Phe Tyr Trp His Lys Arg Gln Asn Glu Asp Ser Thr
  MISC_FEATURE (74)..(74): Xaa at this position is a single (one, 1) amino acid selected from the following options: Gly Pro Ala Val Leu Ile Met Cys Phe Tyr Trp His Lys Arg Gln Asn Glu Asp Ser Thr
  MISC_FEATURE (80)..(80): Xaa at this position is a single (one, 1) amino acid selected from the following options: Gly Pro Ala Val Leu Ile Met Cys Phe Tyr Trp His Lys Arg Gln Asn Glu Asp Ser Thr
  MISC_FEATURE (81)..(81): Xaa at this position is a single (one, 1) amino acid selected from the following options: Gly Pro Ala Val Leu Ile Met Cys Phe Tyr Trp His Lys Arg Gln Asn Glu Asp Ser Thr
MAGSALAVRARFGVWGMKVLQTRGFGSESADNLGSSAGAIRDAGGAFGKKXQAEEERYFRARAKEQLAALKKXXENEISXXVKEIEHLQKEIERHKQSIKKLKHDDD

SEQ ID NO: 84 - protein, 110 aa, Artificial Sequence
  Designed; as detailed elsewhere in present application
  MISC_FEATURE (3)..(3): Xaa at this position is a single (one, 1) amino acid selected from the following options: Val Gly Ala Thr
  MISC_FEATURE (4)..(4): Xaa at this position is a single (one, 1) amino acid selected from the following options: Thr Ser Pro
  MISC_FEATURE (5)..(5): Xaa at this position is a single (one, 1) amino acid selected from the following options: Glu Ala Val
  MISC_FEATURE (6)..(6): Xaa at this position is a single (one, 1) amino acid selected from the following options: Leu Thr Gln
  MISC_FEATURE (7)..(7): Xaa at this position is a single (one, 1) amino acid selected from the following options: Ala Val
  MISC_FEATURE (8)..(8): Xaa at this position is a single (one, 1) amino acid selected from the following options: Ala Val Leu Ile Thr
  MISC_FEATURE (9)..(9): Xaa at this position is a single (one, 1) amino acid selected from the following options: Trp Arg Gln
  MISC_FEATURE (10)..(10): Xaa at this position is a single (one, 1) amino acid selected from the following options: Thr Val Met Ala Ser Leu
  MISC_FEATURE (11)..(11): Xaa at this position is a single (one, 1) amino acid selected from the following options: Gln Trp Arg
  MISC_FEATURE (12)..(12): Xaa at this position is a single (one, 1) amino acid selected from the following options: Leu Phe Gln
  MISC_FEATURE (13)..(13): Xaa at this position is a single (one, 1) amino acid selected from the following options: Arg Gly Tyr Cys Ala
  MISC_FEATURE (14)..(14): Xaa at this position is a single (one, 1) amino acid selected from the following options: Val Ser Ala Thr Met Arg
  MISC_FEATURE (15)..(15): Xaa at this position is a single (one, 1) amino acid selected from the following options: Trp Leu
  MISC_FEATURE (16)..(16): Xaa at this position is a single (one, 1) amino acid selected from the following options: Gly Ser
  MISC_FEATURE (17)..(17): Xaa at this position is a single (one, 1) amino acid selected from the following options: Val Ala Met
  MISC_FEATURE (18)..(18): Xaa at this position is a single (one, 1) amino acid selected from the following options: Arg Trp Lys Leu
  MISC_FEATURE (19)..(19): Xaa at this position is a single (one, 1) amino acid selected from the following options: Thr Ala Val Ser
  MISC_FEATURE (20)..(20): Xaa at this position is a single (one, 1) amino acid selected from the following options: Met Leu Ile Arg Val Ala Thr
  MISC_FEATURE (21)..(21): Xaa at this position is a single (one, 1) amino acid selected from the following options: Gln Arg
  MISC_FEATURE (22)..(22): Xaa at this position is a single (one, 1) amino acid selected from the following options: Ala Thr Gly Ser
  MISC_FEATURE (23)..(23): Xaa at this position is a single (one, 1) amino acid selected from the following options: Leu Arg Gln Gly
  MISC_FEATURE (24)..(24): Xaa at this position is a single (one, 1) amino acid selected from the following options: Gly Ser
  MISC_FEATURE (25)..(25): Xaa at this position is a single (one, 1) amino acid selected from the following options: Phe Tyr
  MISC_FEATURE (26)..(26): Xaa at this position is a single (one, 1) amino acid selected from the following options: Gly Ser Val Ala Thr Leu Arg Phe Ile Lys Met Gln Asn
  MISC_FEATURE (27)..(27): Xaa at this position is a single (one, 1) amino acid selected from the following options: Ser Cys Arg Gly Phe Thr Pro
  MISC_FEATURE (28)..(28): Xaa at this position is a single (one, 1) amino acid selected from the following options: Asp Glu Gly Ser Phe Lys Thr Leu Phe Pro
  MISC_FEATURE (29)..(29): Xaa at this position is a single (one, 1) amino acid selected from the following options: Pro Gln Arg Ser Thr Lys Gly Glu Ala Phe
  MISC_FEATURE (30)..(30): Xaa at this position is a single (one, 1) amino acid selected from the following options: Ser Pro Ala Gly Arg Glu Asp Val
  MISC_FEATURE (31)..(31): Xaa at this position is a single (one, 1) amino acid selected from the following options: Glu Asp Lys His Ala Gly Asn Ser Arg Gln Asp Thr Leu Val
  MISC_FEATURE (32)..(32): Xaa at this position is a single (one, 1) amino acid selected from the following options: Asn Asp Tyr Ser Gly Arg His Lys Glu Ala Leu
  MISC_FEATURE (33)..(33): Xaa at this position is a single (one, 1) amino acid selected from the following options: Val Leu Pro His Met Ile Phe Thr Gly Gly Ser Asp Glu Phe
  MISC_FEATURE (34)..(34): Xaa at this position is a single (one, 1) amino acid selected from the following options: Asp Gly His Arg Ser Glu Pro
  MISC_FEATURE (35)..(35): Xaa at this position is a single (one, 1) amino acid selected from the following options: Arg Ser Gly Thr Pro Ala Lys Glu
  MISC_FEATURE (36)..(36): Xaa at this position is a single (one, 1) amino acid selected from the following options: Arg Thr Gly Ser Arg Pro Lys Asp Ala
  MISC_FEATURE (37)..(37): Xaa at this position is a single (one, 1) amino acid selected from the following options: Ala Glu Ser Gly Arg
  MISC_FEATURE (38)..(38): Xaa at this position is a single (one, 1) amino acid selected from the following options: Ala Gly Gln Pro
  MISC_FEATURE (40)..(40): Xaa at this position is a single (one, 1) amino acid selected from the following options: Ile Val Leu Glu Phe
  MISC_FEATURE (41)..(41): Xaa at this position is a single (one, 1) amino acid selected from the following options: Trp Arg Lys Glu Thr Tyr
  MISC_FEATURE (42)..(42): Xaa at this position is a single (one, 1) amino acid selected from the following options: Asn Glu Asp Ala Lys Ser
  MISC_FEATURE (43)..(43): Xaa at this position is a single (one, 1) amino acid selected from the following options: Ala Arg Lys Cys
  MISC_FEATURE (44)..(44): Xaa at this position is a single (one, 1) amino acid selected from the following options: Gly Tyr Glu Pro
  MISC_FEATURE (45)..(45): Xaa at this position is a single (one, 1) amino acid selected from the following options: Val Gly Phe Lys Arg
  MISC_FEATURE (46)..(46): Xaa at this position is a single (one, 1) amino acid selected from the following options: Asp Ala Ser Arg Leu
  MISC_FEATURE (47)..(47): Xaa at this position is a single (one, 1) amino acid selected from the following options: Phe Leu Ile Glu Ser
  MISC_FEATURE (48)..(48): Xaa at this position is a single (one, 1) amino acid selected from the following options: Arg Gly Ala Ile Glu Ser Pro
  MISC_FEATURE (49)..(49): Xaa at this position is a single (one, 1) amino acid selected from the following options: Lys Arg Thr Glu Gln
  MISC_FEATURE (50)..(50): Xaa at this position is a single (one, 1) amino acid selected from the following options: Arg Lys Met
  MISC_FEATURE (51)..(51): Xaa at this position is a single (one, 1) amino acid selected from the following options: Gly Pro Ala Val Leu Ile Met Cys Phe Tyr Trp His Lys Arg Gln Asn Glu Asp Ser Thr
  MISC_FEATURE (52)..(52): Xaa at this position is a single (one, 1) amino acid selected from the following options: Gln Ala Lys Arg Pro Phe Val
  MISC_FEATURE (53)..(53): Xaa at this position is a single (one, 1) amino acid selected from the following options: Ala Ser Arg
  MISC_FEATURE (54)..(54): Xaa at this position is a single (one, 1) amino acid selected from the following options: Lys Glu Asp His Ala Ile
  MISC_FEATURE (55)..(55): Xaa at this position is a single (one, 1) amino acid selected from the following options: Gly Glu Pro Arg
  MISC_FEATURE (56)..(56): Xaa at this position is a single (one, 1) amino acid selected from the following options: Glu Asp Tyr Thr Gln
  MISC_FEATURE (57)..(57): Xaa at this position is a single (one, 1) amino acid selected from the following options: Arg Met Lys
  MISC_FEATURE (58)..(58): Xaa at this position is a single (one, 1) amino acid selected from the following options: Tyr Phe Glu
  MISC_FEATURE (59)..(59): Xaa at this position is a single (one, 1) amino acid selected from the following options: Leu Phe Pro Gln
  MISC_FEATURE (60)..(60): Xaa at this position is a single (one, 1) amino acid selected from the following options: Arg Leu Lys
  MISC_FEATURE (61)..(61): Xaa at this position is a single (one, 1) amino acid selected from the following options: Ala Lys Glu Thr Asp Gln Arg
  MISC_FEATURE (62)..(62): Xaa at this position is a single (one, 1) amino acid selected from the following options: Gln Arg Lys Ala Cys
  MISC_FEATURE (63)..(63): Xaa at this position is a single (one, 1) amino acid selected from the following options: Ser Thr Ala Asn Glu Leu
  MISC_FEATURE (64)..(64): Xaa at this position is a single (one, 1) amino acid selected from the following options: Arg Lys Gln His Ala
  MISC_FEATURE (65)..(65): Xaa at this position is a single (one, 1) amino acid selected from the following options: Glu Gln Lys
  MISC_FEATURE (66)..(66): Xaa at this position is a single (one, 1) amino acid selected from the following options: Gln Lys
  MISC_FEATURE (67)..(67): Xaa at this position is a single (one, 1) amino acid selected from the following options: Leu His Met Glu
  MISC_FEATURE (68)..(68): Xaa at this position is a single (one, 1) amino acid selected from the following options: Ala Leu Glu Thr Asp Ser
  MISC_FEATURE (69)..(69): Xaa at this position is a single (one, 1) amino acid selected from the following options: Ala Thr Arg Ile Ser Asn Val Met Asp
  MISC_FEATURE (70)..(70): Xaa at this position is a single (one, 1) amino acid selected from the following options: Leu Glu
  MISC_FEATURE (71)..(71): Xaa at this position is a single (one, 1) amino acid selected from the following options: Lys Arg Ile
  MISC_FEATURE (72)..(72): Xaa at this position is a single (one, 1) amino acid selected from the following options: Lys Asn Arg Thr Glu
  MISC_FEATURE (73)..(73): Xaa at this position is a single (one, 1) amino acid selected from the following options: Gly Pro Ala Val Leu Ile Met Cys Phe Tyr Trp His Lys Arg Gln Asn Glu Asp Ser Thr
  MISC_FEATURE (74)..(74): Xaa at this position is a single (one, 1) amino acid selected from the following options: Gly Pro Ala Val Leu Ile Met Cys Phe Tyr Trp His Lys Arg Gln Asn Glu Asp Ser Thr
  MISC_FEATURE (75)..(75): Xaa at this position is a single (one, 1) amino acid selected from the following options: Glu Gln Lys Val
  MISC_FEATURE (76)..(76): Xaa at this position is a single (one, 1) amino acid selected from the following options: Glu Asp Asn Lys
  MISC_FEATURE (77)..(77): Xaa at this position is a single (one, 1) amino acid selected from the following options: Glu Val
  MISC_FEATURE (78)..(78): Xaa at this position is a single (one, 1) amino acid selected from the following options: Ile Val
  MISC_FEATURE (79)..(79): Xaa at this position is a single (one, 1) amino acid selected from the following options: Val Thr Ser Asp Asn Gly Ala Glu Gln Tyr Arg
  MISC_FEATURE (80)..(80): Xaa at this position is a single (one, 1) amino acid selected from the following options: Gly Pro Ala Val Leu Ile Met Cys Phe Tyr Trp His Lys Arg Gln Asn Glu Asp Ser Thr
  MISC_FEATURE (81)..(81): Xaa at this position is a single (one, 1) amino acid selected from the following options: Gly Pro Ala Val Leu Ile Met Cys Phe Tyr Trp His Lys Arg Gln Asn Glu Asp Ser Thr
  MISC_FEATURE (82)..(82): Xaa at this position is a single (one, 1) amino acid selected from the following options: Lys Ser Met Val His Ala Arg Gln Glu Ile Leu Val
  MISC_FEATURE (83)..(83): Xaa at this position is a single (one, 1) amino acid selected from the following options: Lys Glu Gln Arg Gly
  MISC_FEATURE (84)..(84): Xaa at this position is a single (one, 1) amino acid selected from the following options: Glu Ala Gln
  MISC_FEATURE (86)..(86): Xaa at this position is a single (one, 1) amino acid selected from the following options: Glu Lys Asp Gln
  MISC_FEATURE (87)..(87): Xaa at this position is a single (one, 1) amino acid selected from the following options: Arg His Leu Gln Cys Val Gln
  MISC_FEATURE (88)..(88): Xaa at this position is a single (one, 1) amino acid selected from the following options: Leu Met
  MISC_FEATURE (89)..(89): Xaa at this position is a single (one, 1) amino acid selected from the following options: Gln Glu Lys
  MISC_FEATURE (90)..(90): Xaa at this position is a single (one, 1) amino acid selected from the following options: Lys Asn Arg Gln
  MISC_FEATURE (91)..(91): Xaa at this position is a single (one, 1) amino acid selected from the following options: Glu Gln Asn
  MISC_FEATURE (92)..(92): Xaa at this position is a single (one, 1) amino acid selected from the following options: Ile Met
  MISC_FEATURE (93)..(93): Xaa at this position is a single (one, 1) amino acid selected from the following options: Glu Gln Asp Ile Lys
  MISC_FEATURE (94)..(94): Xaa at this position is a single (one, 1) amino acid selected from the following options: Arg Gln Lys Glu
  MISC_FEATURE (95)..(95): Xaa at this position is a single (one, 1) amino acid selected from the following options: His Leu Ile
  MISC_FEATURE (96)..(96): Xaa at this position is a single (one, 1) amino acid selected from the following options: Lys Gln Glu
  MISC_FEATURE (97)..(97): Xaa at this position is a single (one, 1) amino acid selected from the following options: Gln Lys Glu Tyr Gly Ser His Asp Asn
  MISC_FEATURE (98)..(98): Xaa at this position is a single (one, 1) amino acid selected from the following options: Lys Arg Ser Ala Asn Thr His Ser Leu
  MISC_FEATURE (99)..(99): Xaa at this position is a single (one, 1) amino acid selected from the following options: Ile Met Asp Val
  MISC_FEATURE (100)..(100): Xaa at this position is a single (one, 1) amino acid selected from the following options: Lys Gln Arg Asn
  MISC_FEATURE (101)..(101): Xaa at this position is a single (one, 1) amino acid selected from the following options: Met Thr Lys His Tyr Ser Gln Ile Val Asn Asp Arg
  MISC_FEATURE (103)..(103): Xaa at this position is a single (one, 1) amino acid selected from the following options: Lys Asn Ser His Arg Thr Gly
  MISC_FEATURE (104)..(104): Xaa at this position is a single (one, 1) amino acid selected from the following options: His Asp Asn Ser Arg Gln Glu Tyr Asn Leu Gln Gly
  MISC_FEATURE (105)..(105): Xaa at this position is a single (one, 1) amino acid selected from the following options: Asp His Ser Asn Ile or is absent (no amino acid at this position and so this position is not present)
  MISC_FEATURE (106)..(106): Xaa at this position is a single (one, 1) amino acid selected from the following options: Asp Glu His Gly Asn or is absent (no amino acid at this position and so this position is not present)
  MISC_FEATURE (107)..(107): Xaa at this position is a single (one, 1) amino acid selected from the following options: Asp His or is absent (no amino acid at this position and so this position is not present)
  MISC_FEATURE (108)..(108): Xaa at this position is a single (one, 1) amino acid selected from the following options: Asp Glu or is absent (no amino acid at this position and so this position is not present)
  MISC_FEATURE (109)..(109): Asp or is absent (no amino acid at this position and so this position is not present)
  MISC_FEATURE (110)..(110): Asp or is absent (no amino acid at this position and so this position is not present)
MAXXXXXXXXXXXXXXXXXXXXXXXXXXXXXXXXXXXXAXXXXXXXXXXXXXXXXXXXXXXXXXXXXXXXXXXXXXXXXXXXXXIXXXXXXXXXXXXXXXXLXXXXXXXX

SEQ ID NO: 85 - protein, 108 aa, Artificial Sequence
  Designed; as detailed elsewhere in present application
  MISC_FEATURE (3)..(3): Xaa at this position is a single (one, 1) amino acid selected from the following options: Val Gly Ala Thr
  MISC_FEATURE (4)..(4): Xaa at this position is a single (one, 1) amino acid selected from the following options: Thr Ser Pro
  MISC_FEATURE (5)..(5): Xaa at this position is a single (one, 1) amino acid selected from the following options: Ala Val Glu
  MISC_FEATURE (6)..(6): Xaa at this position is a single (one, 1) amino acid selected from the following options: Leu Thr Gln
  MISC_FEATURE (7)..(7): Xaa at this position is a single (one, 1) amino acid selected from the following options: Ala Val
  MISC_FEATURE (8)..(8): Xaa at this position is a single (one, 1) amino acid selected from the following options: Ala Val Leu Ile Thr
  MISC_FEATURE (9)..(9): Xaa at this position is a single (one, 1) amino acid selected from the following options: Arg Gln Trp
  MISC_FEATURE (10)..(10): Xaa at this position is a single (one, 1) amino acid selected from the following options: Thr Val Met Ala Ser Leu
  MISC_FEATURE (11)..(11): Xaa at this position is a single (one, 1) amino acid selected from the following options: Trp Arg Gln
  MISC_FEATURE (12)..(12): Xaa at this position is a single (one, 1) amino acid selected from the following options: Leu Phe Gln
  MISC_FEATURE (13)..(13): Xaa at this position is a single (one, 1) amino acid selected from the following options: Gly Tyr Cys Ala Arg
  MISC_FEATURE (14)..(14): Xaa at this position is a single (one, 1) amino acid selected from the following options: Val Ser Ala Thr Met Arg
  MISC_FEATURE (15)..(15): Xaa at this position is a single (one, 1) amino acid selected from the following options: Trp Leu
  MISC_FEATURE (16)..(16): Xaa at this position is a single (one, 1) amino acid selected from the following options: Gly Ser
  MISC_FEATURE (17)..(17): Xaa at this position is a single (one, 1) amino acid selected from the following options: Val Ala Met
  MISC_FEATURE (18)..(18): Xaa at this position is a single (one, 1) amino acid selected from the following options: Arg Trp Lys Leu
  MISC_FEATURE (19)..(19): Xaa at this position is a single (one, 1) amino acid selected from the following options: Thr Ala Val Ser
  MISC_FEATURE (20)..(20): Xaa at this position is a single (one, 1) amino acid selected from the following options: Met Leu Ile Arg Val Ala Thr
  MISC_FEATURE (21)..(21): Xaa at this position is a single (one, 1) amino acid selected from the following options: Gln Arg
  MISC_FEATURE (22)..(22): Xaa at this position is a single (one, 1) amino acid selected from the following options: Ala Thr Gly Ser
  MISC_FEATURE (23)..(23): Xaa at this position is a single (one, 1) amino acid selected from the following options: Arg Gln Gly Leu
  MISC_FEATURE (24)..(24): Xaa at this position is a single (one, 1) amino acid selected from the following options: Gly Ser
  MISC_FEATURE (25)..(25): Xaa at this position is a single (one, 1) amino acid selected from the following options: Phe Tyr
  MISC_FEATURE (26)..(26): Xaa at this position is a single (one, 1) amino acid selected from the following options: Gly Leu
  MISC_FEATURE (27)..(27): Xaa at this position is a single (one, 1) amino acid selected from the following options: Ser Gly
  MISC_FEATURE (28)..(28): Xaa at this position is a single (one, 1) amino acid selected from the following options: Glu Asp Ser
  MISC_FEATURE (29)..(29): Xaa at this position is a single (one, 1) amino acid selected from the following options: Gly Ser Gln Pro
  MISC_FEATURE (30)..(30): Xaa at this position is a single (one, 1) amino acid selected from the following options: Ala Ser
  MISC_FEATURE (31)..(31): Xaa at this position is a single (one, 1) amino acid selected from the following options: Asp Gly Glu
  MISC_FEATURE (32)..(32): Xaa at this position is a single (one, 1) amino acid selected from the following options: Asn Lys
  MISC_FEATURE (33)..(33): Xaa at this position is a single (one, 1) amino acid selected from the following options: Leu Gly Val
  MISC_FEATURE (34)..(34): Xaa at this position is a single (one, 1) amino acid selected from the following options: Gly Asp
  MISC_FEATURE (35)..(35): Xaa at this position is a single (one, 1) amino acid selected from the following options: Ser Gly Arg
  MISC_FEATURE (36)..(36): Xaa at this position is a single (one, 1) amino acid selected from the following options: Ser Gly
  MISC_FEATURE (37)..(37): Xaa at this position is a single (one, 1) amino acid selected from the following options: Ala Gly Glu
  MISC_FEATURE (38)..(38): Xaa at this position is a single (one, 1) amino acid selected from the following options: Gly Ala
  MISC_FEATURE (40)..(40): Xaa at this position is a single (one, 1) amino acid selected from the following options: Ile Val
  MISC_FEATURE (41)..(41): Xaa at this position is a single (one, 1) amino acid selected from the following options: Arg Trp
  MISC_FEATURE (42)..(42): Xaa at this position is a single (one, 1) amino acid selected from the following options: Asp Glu Asn
  MISC_FEATURE (45)..(45): Xaa at this position is a single (one, 1) amino acid selected from the following options: Gly Val
  MISC_FEATURE (46)..(46): Xaa at this position is a single (one, 1) amino acid selected from the following options: Ala Asp
  MISC_FEATURE (48)..(48): Xaa at this position is a single (one, 1) amino acid selected from the following options: Gly Arg
  MISC_FEATURE (50)..(50): Xaa at this position is a single (one, 1) amino acid selected from the following options: Lys Arg
  MISC_FEATURE (51)..(51): Xaa at this position is a single (one, 1) amino acid selected from the following options: Gly Pro Ala Val Leu Ile Met Cys Phe Tyr Trp His Lys Arg Gln Asn Glu Asp Ser Thr
  MISC_FEATURE (52)..(52): Xaa at this position is a single (one, 1) amino acid selected from the following options: Gln Ala
  MISC_FEATURE (54)..(54): Xaa at this position is a single (one, 1) amino acid selected from the following options: Glu His Lys
  MISC_FEATURE (55)..(55): Xaa at this position is a single (one, 1) amino acid selected from the following options: Glu Gly
  MISC_FEATURE (59)..(59): Xaa at this position is a single (one, 1) amino acid selected from the following options: Phe Leu
  MISC_FEATURE (61)..(61): Xaa at this position is a single (one, 1) amino acid selected from the following options: Ala Glu Asp
  MISC_FEATURE (62)..(62): Xaa at this position is a single (one, 1) amino acid selected from the following options: Arg Lys Gln
  MISC_FEATURE (63)..(63): Xaa at this position is a single (one, 1) amino acid selected from the following options: Ala Glu Ser
  MISC_FEATURE (64)..(64): Xaa at this position is a single (one, 1) amino acid selected from the following options: Lys Arg
  MISC_FEATURE (69)..(69): Xaa at this position is a single (one, 1) amino acid selected from the following options: Ala Ser
  MISC_FEATURE (71)..(71): Xaa at this position is a single (one, 1) amino acid selected from the following options: Lys Arg
  MISC_FEATURE (72)..(72): Xaa at this position is a single (one, 1) amino acid selected from the following options: Lys Glu
  MISC_FEATURE (73)..(73): Xaa at this position is a single (one, 1) amino acid selected from the following options: Gly Pro Ala Val Leu Ile Met Cys Phe Tyr Trp His Lys Arg Gln Asn Glu Asp Ser Thr
  MISC_FEATURE (74)..(74): Xaa at this position is a single (one, 1) amino acid selected from the following options: Gly Pro Ala Val Leu Ile Met Cys Phe Tyr Trp His Lys Arg Gln Asn Glu Asp Ser Thr
  MISC_FEATURE (76)..(76): Xaa at this position is a single (one, 1) amino acid selected from the following options: Glu Asn
  MISC_FEATURE (79)..(79): Xaa at this position is a single (one, 1) amino acid selected from the following options: Ser Asp Val
  MISC_FEATURE (80)..(80): Xaa at this position is a single (one, 1) amino acid selected from the following options: Gly Pro Ala Val Leu Ile Met Cys Phe Tyr Trp His Lys Arg Gln Asn Glu Asp Ser Thr
  MISC_FEATURE (81)..(81): Xaa at this position is a single (one, 1) amino acid selected from the following options: Gly Pro Ala Val Leu Ile Met Cys Phe Tyr Trp His Lys Arg Gln Asn Glu Asp Ser Thr
  MISC_FEATURE (82)..(82): Xaa at this position is a single (one, 1) amino acid selected from the following options: Lys Val
  MISC_FEATURE (86)..(86): Xaa at this position is a single (one, 1) amino acid selected from the following options: Glu Gln
  MISC_FEATURE (87)..(87): Xaa at this position is a single (one, 1) amino acid selected from the following options: His Arg
  MISC_FEATURE (93)..(93): Xaa at this position is a single (one, 1) amino acid selected from the following options: Glu Asp
  MISC_FEATURE (97)..(97): Xaa at this position is a single (one, 1) amino acid selected from the following options: Gln Asn
  MISC_FEATURE (98)..(98): Xaa at this position is a single (one, 1) amino acid selected from the following options: Ser Lys
  MISC_FEATURE (101)..(101): Xaa at this position is a single (one, 1) amino acid selected from the following options: Lys Met
  MISC_FEATURE (104)..(104): Xaa at this position is a single (one, 1) amino acid selected from the following options: His Gly
  MISC_FEATURE (107)..(107): Asp or is absent (no amino acid at this position and so this position is not present)
  MISC_FEATURE (108)..(108): Asp or is absent (no amino acid at this position and so this position is not present)
MAXXXXXXXXXXXXXXXXXXXXXXXXXXXXXXXXXXXXAXXXAGXXFXKXXXAXXERYXRXXXXEQLAXLXXXXEXEIXXXXKEIXXLQKEIXRHKXXIKXLKXDDXX

SEQ ID NO: 86 - protein, 108 aa, Artificial Sequence
  Designed; as detailed elsewhere in present application
  MISC_FEATURE (3)..(3): Xaa at this position is a single (one, 1) amino acid selected from the following options: Val Gly Ala Thr
  MISC_FEATURE (4)..(4): Xaa at this position is a single (one, 1) amino acid selected from the following options: Thr Ser Pro
  MISC_FEATURE (5)..(5): Xaa at this position is a single (one, 1) amino acid selected from the following options: Ala Val Glu
  MISC_FEATURE (6)..(6): Xaa at this position is a single (one, 1) amino acid selected from the following options: Leu Thr Gln
  MISC_FEATURE (7)..(7): Xaa at this position is a single (one, 1) amino acid selected from the following options: Ala Val
  MISC_FEATURE (8)..(8): Xaa at this position is a single (one, 1) amino acid selected from the following options: Ala Val Leu Ile Thr
  MISC_FEATURE (9)..(9): Xaa at this position is a single (one, 1) amino acid selected from the following options: Arg Gln Trp
  MISC_FEATURE (10)..(10): Xaa at this position is a single (one, 1) amino acid selected from the following options: Thr Val Met Ala Ser Leu
  MISC_FEATURE (11)..(11): Xaa at this position is a single (one, 1) amino acid selected from the following options: Trp Arg Gln
  MISC_FEATURE (12)..(12): Xaa at this position is a single (one, 1) amino acid selected from the following options: Leu Phe Gln
  MISC_FEATURE (13)..(13): Xaa at this position is a single (one, 1) amino acid selected from the following options: Gly Tyr Cys Ala Arg
  MISC_FEATURE (14)..(14): Xaa at this position is a single (one, 1) amino acid selected from the following options: Val Ser Ala Thr Met Arg
  MISC_FEATURE (15)..(15): Xaa at this position is a single (one, 1) amino acid selected from the following options: Trp Leu
  MISC_FEATURE (16)..(16): Xaa at this position is a single (one, 1) amino acid selected from the following options: Gly Ser
  MISC_FEATURE (17)..(17): Xaa at this position is a single (one, 1) amino acid selected from the following options: Val Ala Met
  MISC_FEATURE (18)..(18): Xaa at this position is a single (one, 1) amino acid selected from the following options: Arg Trp Lys Leu
  MISC_FEATURE (19)..(19): Xaa at this position is a single (one, 1) amino acid selected from the following options: Thr Ala Val Ser
  MISC_FEATURE (20)..(20): Xaa at this position is a single (one, 1) amino acid selected from the following options: Met Leu Ile Arg Val Ala Thr
  MISC_FEATURE (21)..(21): Xaa at this position is a single (one, 1) amino acid selected from the following options: Gln Arg
  MISC_FEATURE (22)..(22): Xaa at this position is a single (one, 1) amino acid selected from the following options: Ala Thr Gly Ser
  MISC_FEATURE (23)..(23): Xaa at this position is a single (one, 1) amino acid selected from the following options: Arg Gln Gly Leu
  MISC_FEATURE (24)..(24): Xaa at this position is a single (one, 1) amino acid selected from the following options: Gly Ser
  MISC_FEATURE (25)..(25): Xaa at this position is a single (one, 1) amino acid selected from the following options: Phe Tyr
  MISC_FEATURE (26)..(26): Xaa at this position is a single (one, 1) amino acid selected from the following options: Gly Leu
  MISC_FEATURE (27)..(27): Xaa at this position is a single (one, 1) amino acid selected from the following options: Ser Gly
  MISC_FEATURE (28)..(28): Xaa at this position is a single (one, 1) amino acid selected from the following options: Glu Asp
  MISC_FEATURE (29)..(29): Xaa at this position is a single (one, 1) amino acid selected from the following options: Gly Ser
  MISC_FEATURE (30)..(30): Xaa at this position is a single (one, 1) amino acid selected from the following options: Ala Ser
  MISC_FEATURE (31)..(31): Xaa at this position is a single (one, 1) amino acid selected from the following options: Asp Gly
  MISC_FEATURE (32)..(32): Xaa at this position is a single (one, 1) amino acid selected from the following options: Asn Lys
  MISC_FEATURE (33)..(33): Xaa at this position is a single (one, 1) amino acid selected from the following options: Leu Gly
  MISC_FEATURE (34)..(34): Xaa at this position is a single (one, 1) amino acid selected from the following options: Gly Asp
  MISC_FEATURE (35)..(35): Xaa at this position is a single (one, 1) amino acid selected from the following options: Ser Gly
  MISC_FEATURE (36)..(36): Xaa at this position is a single (one, 1) amino acid selected from the following options: Ser Gly
  MISC_FEATURE (37)..(37): Xaa at this position is a single (one, 1) amino acid selected from the following options: Ala Gly
  MISC_FEATURE (38)..(38): Xaa at this position is a single (one, 1) amino acid selected from the following options: Gly Ala
  MISC_FEATURE (40)..(40): Xaa at this position is a single (one, 1) amino acid selected from the following options: Ile Val
  MISC_FEATURE (41)..(41): Xaa at this position is a single (one, 1) amino acid selected from the following options: Arg Trp
  MISC_FEATURE (42)..(42): Xaa at this position is a single (one, 1) amino acid selected from the following options: Asp Glu
  MISC_FEATURE (50)..(50): Xaa at this position is a single (one, 1) amino acid selected from the following options: Lys Arg
  MISC_FEATURE (51)..(51): Xaa at this position is a single (one, 1) amino acid selected from the following options: Gly Pro Ala Val Leu Ile Met Cys Phe Tyr Trp His Lys Arg Gln Asn Glu Asp Ser Thr
  MISC_FEATURE (52)..(52): Xaa at this position is a single (one, 1) amino acid selected from the following options: Gln Ala
  MISC_FEATURE (54)..(54): Xaa at this position is a single (one, 1) amino acid selected from the following options: Glu His
  MISC_FEATURE (59)..(59): Xaa at this position is a single (one, 1) amino acid selected from the following options: Phe Leu
  MISC_FEATURE (61)..(61): Xaa at this position is a single (one, 1) amino acid selected from the following options: Ala Glu
  MISC_FEATURE (62)..(62): Xaa at this position is a single (one, 1) amino acid selected from the following options: Arg Lys
  MISC_FEATURE (63)..(63): Xaa at this position is a single (one, 1) amino acid selected from the following options: Ala Glu
  MISC_FEATURE (64)..(64): Xaa at this position is a single (one, 1) amino acid selected from the following options: Lys Arg
  MISC_FEATURE (69)..(69): Xaa at this position is a single (one, 1) amino acid selected from the following options: Ala Ser
  MISC_FEATURE (71)..(71): Xaa at this position is a single (one, 1) amino acid selected from the following options: Lys Arg
  MISC_FEATURE (72)..(72): Xaa at this position is a single (one, 1) amino acid selected from the following options: Lys Glu
  MISC_FEATURE (73)..(73): Xaa at this position is a single (one, 1) amino acid selected from the following options: Gly Pro Ala Val Leu Ile Met Cys Phe Tyr Trp His Lys Arg Gln Asn Glu Asp Ser Thr
  MISC_FEATURE (74)..(74): Xaa at this position is a single (one, 1) amino acid selected from the following options: Gly Pro Ala Val Leu Ile Met Cys Phe Tyr Trp His Lys Arg Gln Asn Glu Asp Ser Thr
  MISC_FEATURE (76)..(76): Xaa at this position is a single (one, 1) amino acid selected from the following options: Glu Asn
  MISC_FEATURE (79)..(79): Xaa at this position is a single (one, 1) amino acid selected from the following options: Ser Asp
  MISC_FEATURE (80)..(80): Xaa at this position is a single (one, 1) amino acid selected from the following options: Gly Pro Ala Val Leu Ile Met Cys Phe Tyr Trp His Lys Arg Gln Asn Glu Asp Ser Thr
  MISC_FEATURE (81)..(81): Xaa at this position is a single (one, 1) amino acid selected from the following options: Gly Pro Ala Val Leu Ile Met Cys Phe Tyr Trp His Lys Arg Gln Asn Glu Asp Ser Thr
  MISC_FEATURE (82)..(82): Xaa at this position is a single (one, 1) amino acid selected from the following options: Lys Val
  MISC_FEATURE (86)..(86): Xaa at this position is a single (one, 1) amino acid selected from the following options: Glu Gln
  MISC_FEATURE (87)..(87): Xaa at this position is a single (one, 1) amino acid selected from the following options: His Arg
  MISC_FEATURE (93)..(93): Xaa at this position is a single (one, 1) amino acid selected from the following options: Glu Asp
  MISC_FEATURE (97)..(97): Xaa at this position is a single (one, 1) amino acid selected from the following options: Gln Asn
  MISC_FEATURE (98)..(98): Xaa at this position is a single (one, 1) amino acid selected from the following options: Ser Lys
  MISC_FEATURE (104)..(104): Xaa at this position is a single (one, 1) amino acid selected from the following options: His Gly
  MISC_FEATURE (108)..(108): Asp or is absent (no amino acid at this position and so this position is not present)
MAXXXXXXXXXXXXXXXXXXXXXXXXXXXXXXXXXXXXAXXXAGGAFGKXXXAXEERYXRXXXXEQLAXLXXXXEXEIXXXXKEIXXLQKEIXRHKXXIKKLKXDDDX

SEQ ID NO: 87 - protein, 108 aa, Artificial Sequence
  Designed; as detailed elsewhere in present application
  MISC_FEATURE (26)..(26): Xaa at this position is a single (one, 1) amino acid selected from the following options: Gly Leu
  MISC_FEATURE (27)..(27): Xaa at this position is a single (one, 1) amino acid selected from the following options: Ser Gly
  MISC_FEATURE (28)..(28): Xaa at this position is a single (one, 1) amino acid selected from the following options: Glu Asp
  MISC_FEATURE (29)..(29): Xaa at this position is a single (one, 1) amino acid selected from the following options: Gly Ser
  MISC_FEATURE (30)..(30): Xaa at this position is a single (one, 1) amino acid selected from the following options: Ala Ser
  MISC_FEATURE (31)..(31): Xaa at this position is a single (one, 1) amino acid selected from the following options: Asp Gly
  MISC_FEATURE (32)..(32): Xaa at this position is a single (one, 1) amino acid selected from the following options: Asn Lys
  MISC_FEATURE (33)..(33): Xaa at this position is a single (one, 1) amino acid selected from the following options: Leu Gly
  MISC_FEATURE (34)..(34): Xaa at this position is a single (one, 1) amino acid selected from the following options: Gly Asp
  MISC_FEATURE (35)..(35): Xaa at this position is a single (one, 1) amino acid selected from the following options: Ser Gly
  MISC_FEATURE (36)..(36): Xaa at this position is a single (one, 1) amino acid selected from the following options: Ser Gly
  MISC_FEATURE (37)..(37): Xaa at this position is a single (one, 1) amino acid selected from the following options: Ala Gly
  MISC_FEATURE (38)..(38): Xaa at this position is a single (one, 1) amino acid selected from the following options: Gly Ala
  MISC_FEATURE (40)..(40): Xaa at this position is a single (one, 1) amino acid selected from the following options: Ile Val
  MISC_FEATURE (41)..(41): Xaa at this position is a single (one, 1) amino acid selected from the following options: Arg Trp
  MISC_FEATURE (42)..(42): Xaa at this position is a single (one, 1) amino acid selected from the following options: Asp Glu
  MISC_FEATURE (50)..(50): Xaa at this position is a single (one, 1) amino acid selected from the following options: Lys Arg
  MISC_FEATURE (51)..(51): Xaa at this position is a single (one, 1) amino acid selected from the following options: Gly Pro Ala Val Leu Ile Met Cys Phe Tyr Trp His Lys Arg Gln Asn Glu Asp Ser Thr
  MISC_FEATURE (52)..(52): Xaa at this position is a single (one, 1) amino acid selected from the following options: Gln Ala
  MISC_FEATURE (54)..(54): Xaa at this position is a single (one, 1) amino acid selected from the following options: Glu His
  MISC_FEATURE (59)..(59): Xaa at this position is a single (one, 1) amino acid selected from the following options: Phe Leu
  MISC_FEATURE (61)..(61): Xaa at this position is a single (one, 1) amino acid selected from the following options: Ala Glu
  MISC_FEATURE (62)..(62): Xaa at this position is a single (one, 1) amino acid selected from the following options: Arg Lys
  MISC_FEATURE (63)..(63): Xaa at this position is a single (one, 1) amino acid selected from the following options: Ala Glu
  MISC_FEATURE (64)..(64): Xaa at this position is a single (one, 1) amino acid selected from the following options: Lys Arg
  MISC_FEATURE (69)..(69): Xaa at this position is a single (one, 1) amino acid selected from the following options: Ala Ser
  MISC_FEATURE (71)..(71): Xaa at this position is a single (one, 1) amino acid selected from the following options: Lys Arg
  MISC_FEATURE (72)..(72): Xaa at this position is a single (one, 1) amino acid selected from the following options: Lys Glu
  MISC_FEATURE (73)..(73): Xaa at this position is a single (one, 1) amino acid selected from the following options: Gly Pro Ala Val Leu Ile Met Cys Phe Tyr Trp His Lys Arg Gln Asn Glu Asp Ser Thr
  MISC_FEATURE (74)..(74): Xaa at this position is a single (one, 1) amino acid selected from the following options: Gly Pro Ala Val Leu Ile Met Cys Phe Tyr Trp His Lys Arg Gln Asn Glu Asp Ser Thr
  MISC_FEATURE (76)..(76): Xaa at this position is a single (one, 1) amino acid selected from the following options: Glu Asn
  MISC_FEATURE (79)..(79): Xaa at this position is a single (one, 1) amino acid selected from the following options: Ser Asp
  MISC_FEATURE (80)..(80): Xaa at this position is a single (one, 1) amino acid selected from the following options: Gly Pro Ala Val Leu Ile Met Cys Phe Tyr Trp His Lys Arg Gln Asn Glu Asp Ser Thr
  MISC_FEATURE (81)..(81): Xaa at this position is a single (one, 1) amino acid selected from the following options: Gly Pro Ala Val Leu Ile Met Cys Phe Tyr Trp His Lys Arg Gln Asn Glu Asp Ser Thr
  MISC_FEATURE (82)..(82): Xaa at this position is a single (one, 1) amino acid selected from the following options: Lys Val
  MISC_FEATURE (86)..(86): Xaa at this position is a single (one, 1) amino acid selected from the following options: Glu Gln
  MISC_FEATURE (87)..(87): Xaa at this position is a single (one, 1) amino acid selected from the following options: His Arg
  MISC_FEATURE (93)..(93): Xaa at this position is a single (one, 1) amino acid selected from the following options: Glu Asp
  MISC_FEATURE (97)..(97): Xaa at this position is a single (one, 1) amino acid selected from the following options: Gln Asn
  MISC_FEATURE (98)..(98): Xaa at this position is a single (one, 1) amino acid selected from the following options: Ser Lys
  MISC_FEATURE (104)..(104): Xaa at this position is a single (one, 1) amino acid selected from the following options: His Gly
  MISC_FEATURE (108)..(108): Asp or is absent (no amino acid at this position and so this position is not present)
MAVTALAARTWLGVWGVRTMQARGFXXXXXXXXXXXXXAXXXAGGAFGKXXXAXEERYXRXXXXEQLAXLXXXXEXEIXXXXKEIXXLQKEIXRHKXXIKKLKXDDDX

SEQ ID NO: 88 - protein, 108 aa, Artificial Sequence
  Designed; as detailed elsewhere in present application
  MISC_FEATURE (26)..(26): Xaa at this position is a single (one, 1) amino acid selected from the following options: Gly Leu
  MISC_FEATURE (27)..(27): Xaa at this position is a single (one, 1) amino acid selected from the following options: Ser Gly
  MISC_FEATURE (28)..(28): Xaa at this position is a single (one, 1) amino acid selected from the following options: Glu Asp
  MISC_FEATURE (29)..(29): Xaa at this position is a single (one, 1) amino acid selected from the following options: Gly Ser
  MISC_FEATURE (30)..(30): Xaa at this position is a single (one, 1) amino acid selected from the following options: Ala Ser
  MISC_FEATURE (31)..(31): Xaa at this position is a single (one, 1) amino acid selected from the following options: Asp Gly
  MISC_FEATURE (32)..(32): Xaa at this position is a single (one, 1) amino acid selected from the following options: Asn Lys
  MISC_FEATURE (33)..(33): Xaa at this position is a single (one, 1) amino acid selected from the following options: Leu Gly
  MISC_FEATURE (34)..(34): Xaa at this position is a single (one, 1) amino acid selected from the following options: Gly Asp
  MISC_FEATURE (35)..(35): Xaa at this position is a single (one, 1) amino acid selected from the following options: Ser Gly
  MISC_FEATURE (36)..(36): Xaa at this position is a single (one, 1) amino acid selected from the following options: Ser Gly
  MISC_FEATURE (37)..(37): Xaa at this position is a single (one, 1) amino acid selected from the following options: Ala Gly
  MISC_FEATURE (38)..(38): Xaa at this position is a single (one, 1) amino acid selected from the following options: Gly Ala
  MISC_FEATURE (40)..(40): Xaa at this position is a single (one, 1) amino acid selected from the following options: Ile Val
  MISC_FEATURE (41)..(41): Xaa at this position is a single (one, 1) amino acid selected from the following options: Arg Trp
  MISC_FEATURE (42)..(42): Xaa at this position is a single (one, 1) amino acid selected from the following options: Asp Glu
  MISC_FEATURE (50)..(50): Xaa at this position is a single (one, 1) amino acid selected from the following options: Lys Arg
  MISC_FEATURE (51)..(51): Xaa at this position is a single (one, 1) amino acid selected from the following options: Gly Pro Ala Val Leu Ile Met Cys Phe Tyr Trp His Lys Arg Gln Asn Glu Asp Ser Thr
  MISC_FEATURE (52)..(52): Xaa at this position is a single (one, 1) amino acid selected from the following options: Gln Ala
  MISC_FEATURE (54)..(54): Xaa at this position is a single (one, 1) amino acid selected from the following options: Glu His
  MISC_FEATURE (59)..(59): Xaa at this position is a single (one, 1) amino acid selected from the following options: Phe Leu
  MISC_FEATURE (61)..(61): Xaa at this position is a single (one, 1) amino acid selected from the following options: Ala Glu
  MISC_FEATURE (62)..(62): Xaa at this position is a single (one, 1) amino acid selected from the following options: Arg Lys
  MISC_FEATURE (63)..(63): Xaa at this position is a single (one, 1) amino acid selected from the following options: Ala Glu
  MISC_FEATURE (64)..(64): Xaa at this position is a single (one, 1) amino acid selected from the following options: Lys Arg
  MISC_FEATURE (69)..(69): Xaa at this position is a single (one, 1) amino acid selected from the following options: Ala Ser
  MISC_FEATURE (71)..(71): Xaa at this position is a single (one, 1) amino acid selected from the following options: Lys Arg
  MISC_FEATURE (72)..(72): Xaa at this position is a single (one, 1) amino acid selected from the following options: Lys Glu
  MISC_FEATURE (73)..(73): Xaa at this position is a single (one, 1) amino acid selected from the following options: Gly Pro Ala Val Leu Ile Met Cys Phe Tyr Trp His Lys Arg Gln Asn Glu Asp Ser Thr
  MISC_FEATURE (74)..(74): Xaa at this position is a single (one, 1) amino acid selected from the following options: Gly Pro Ala Val Leu Ile Met Cys Phe Tyr Trp His Lys Arg Gln Asn Glu Asp Ser Thr
  MISC_FEATURE (76)..(76): Xaa at this position is a single (one, 1) amino acid selected from the following options: Glu Asn
  MISC_FEATURE (79)..(79): Xaa at this position is a single (one, 1) amino acid selected from the following options: Ser Asp
  MISC_FEATURE (80)..(80): Xaa at this position is a single (one, 1) amino acid selected from the following options: Gly Pro Ala Val Leu Ile Met Cys Phe Tyr Trp His Lys Arg Gln Asn Glu Asp Ser Thr
  MISC_FEATURE (81)..(81): Xaa at this position is a single (one, 1) amino acid selected from the following options: Gly Pro Ala Val Leu Ile Met Cys Phe Tyr Trp His Lys Arg Gln Asn Glu Asp Ser Thr
  MISC_FEATURE (82)..(82): Xaa at this position is a single (one, 1) amino acid selected from the following options: Lys Val
  MISC_FEATURE (86)..(86): Xaa at this position is a single (one, 1) amino acid selected from the following options: Glu Gln
  MISC_FEATURE (87)..(87): Xaa at this position is a single (one, 1) amino acid selected from the following options: His Arg
  MISC_FEATURE (93)..(93): Xaa at this position is a single (one, 1) amino acid selected from the following options: Glu Asp
  MISC_FEATURE (97)..(97): Xaa at this position is a single (one, 1) amino acid selected from the following options: Gln Asn
  MISC_FEATURE (98)..(98): Xaa at this position is a single (one, 1) amino acid selected from the following options: Ser Lys
  MISC_FEATURE (104)..(104): Xaa at this position is a single (one, 1) amino acid selected from the following options: His Gly
  MISC_FEATURE (108)..(108): Asp or is absent (no amino acid at this position and so this position is not present)
MAGSALAVRARFGVWGMKVLQTRGFXXXXXXXXXXXXXAXXXAGGAFGKXXXAXEERYXRXXXXEQLAXLXXXXEXEIXXXXKEIXXLQKEIXRHKXXIKKLKXDDDX

SEQ ID NO: 89 - protein, 115 aa, Artificial Sequence
  Designed; as detailed elsewhere in present application
  MISC_FEATURE (3)..(3): Xaa at this position is a single (one, 1) amino acid selected from the following options: Val Gly Ala Thr
  MISC_FEATURE (4)..(4): Xaa at this position is a single (one, 1) amino acid selected from the following options: Thr Ser Pro
  MISC_FEATURE (5)..(5): Xaa at this position is a single (one, 1) amino acid selected from the following options: Glu Ala Val
  MISC_FEATURE (6)..(6): Xaa at this position is a single (one, 1) amino acid selected from the following options: Leu Thr Gln
  MISC_FEATURE (7)..(7): Xaa at this position is a single (one, 1) amino acid selected from the following options: Ala Val
  MISC_FEATURE (8)..(8): Xaa at this position is a single (one, 1) amino acid selected from the following options: Ala Val Leu Ile Thr
  MISC_FEATURE (9)..(9): Xaa at this position is a single (one, 1) amino acid selected from the following options: Trp Arg Gln
  MISC_FEATURE (10)..(10): Xaa at this position is a single (one, 1) amino acid selected from the following options: Thr Val Met Ala Ser Leu
  MISC_FEATURE (11)..(11): Xaa at this position is a single (one, 1) amino acid selected from the following options: Gln Trp Arg
  MISC_FEATURE (12)..(12): Xaa at this position is a single (one, 1) amino acid selected from the following options: Leu Phe Gln
  MISC_FEATURE (13)..(13): Xaa at this position is a single (one, 1) amino acid selected from the following options: Arg Gly Tyr Cys Ala
  MISC_FEATURE (14)..(14): Xaa at this position is a single (one, 1) amino acid selected from the following options: Val Ser Ala Thr Met Arg
  MISC_FEATURE (15)..(15): Xaa at this position is a single (one, 1) amino acid selected from the following options: Trp Leu
  MISC_FEATURE (16)..(16): Xaa at this position is a single (one, 1) amino acid selected from the following options: Gly Ser
  MISC_FEATURE (17)..(17): Xaa at this position is a single (one, 1) amino acid selected from the following options: Val Ala Met
  MISC_FEATURE (18)..(18): Xaa at this position is a single (one, 1) amino acid selected from the following options: Arg Trp Lys Leu
  MISC_FEATURE (19)..(19): Xaa at this position is a single (one, 1) amino acid selected from the following options: Thr Ala Val Ser
  MISC_FEATURE (20)..(20): Xaa at this position is a single (one, 1) amino acid selected from the following options: Met Leu Ile Arg Val Ala Thr
  MISC_FEATURE (21)..(21): Xaa at this position is a single (one, 1) amino acid selected from the following options: Gln Arg
  MISC_FEATURE (22)..(22): Xaa at this position is a single (one, 1) amino acid selected from the following options: Ala Thr Gly Ser
  MISC_FEATURE (23)..(23): Xaa at this position is a single (one, 1) amino acid selected from the following options: Leu Arg Gln Gly
  MISC_FEATURE (24)..(24): Xaa at this position is a single (one, 1) amino acid selected from the following options: Gly Ser
  MISC_FEATURE (25)..(25): Xaa at this position is a single (one, 1) amino acid selected from the following options: Phe Tyr
  MISC_FEATURE (26)..(26): Xaa at this position is a single (one, 1) amino acid selected from the following options: Gly Ser Val Ala Thr Leu Arg Phe Ile Lys Met Gln Asn
  MISC_FEATURE (27)..(27): Xaa at this position is a single (one, 1) amino acid selected from the following options: Ser Cys Arg Gly Phe Thr Pro
  MISC_FEATURE (28)..(28): Xaa at this position is a single (one, 1) amino acid selected from the following options: Asp Glu Gly Ser Phe Lys Thr Leu Phe Pro
  MISC_FEATURE (29)..(29): Xaa at this position is a single (one, 1) amino acid selected from the following options: Pro Gln Arg Ser Thr Lys Gly Glu Ala Phe
  MISC_FEATURE (30)..(30): Xaa at this position is a single (one, 1) amino acid selected from the following options: Ser Pro Ala Gly Arg Glu Asp Val
  MISC_FEATURE (31)..(31): Xaa at this position is a single (one, 1) amino acid selected from the following options: Glu Asp Lys His Ala Gly Asn Ser Arg Gln Asp Thr Leu Val
  MISC_FEATURE (32)..(32): Xaa at this position is a single (one, 1) amino acid selected from the following options: Asn Asp Tyr Ser Gly Arg His Lys Glu Ala Leu
  MISC_FEATURE (33)..(33): Xaa at this position is a single (one, 1) amino acid selected from the following options: Val Leu Pro His Met Ile Phe Thr Gly Gly Ser Asp Glu Phe
  MISC_FEATURE (34)..(34): Xaa at this position is a single (one, 1) amino acid selected from the following options: Asp Gly His Arg Ser Glu Pro
  MISC_FEATURE (35)..(35): Xaa at this position is a single (one, 1) amino acid selected from the following options: Arg Ser Gly Thr Pro Ala Lys Glu
  MISC_FEATURE (36)..(36): Xaa at this position is a single (one, 1) amino acid selected from the following options: Arg Thr Gly Ser Arg Pro Lys Asp Ala
  MISC_FEATURE (37)..(37): Xaa at this position is a single (one, 1) amino acid selected from the following options: Ala Glu Ser Gly Arg
  MISC_FEATURE (38)..(38): Xaa at this position is a single (one, 1) amino acid selected from the following options: Ala Gly Gln Pro
  MISC_FEATURE (40)..(40): Xaa at this position is a single (one, 1) amino acid selected from the following options: Ile Val Leu Glu Phe
  MISC_FEATURE (41)..(41): Xaa at this position is a single (one, 1) amino acid selected from the following options: Trp Arg Lys Glu Thr Tyr
  MISC_FEATURE (42)..(42): Xaa at this position is a single (one, 1) amino acid selected from the following options: Asn Glu Asp Ala Lys Ser
  MISC_FEATURE (43)..(43): Xaa at this position is a single (one, 1) amino acid selected from the following options: Ala Arg Lys Cys
  MISC_FEATURE (44)..(44): Xaa at this position is a single (one, 1) amino acid selected from the following options: Gly Tyr Glu Pro
  MISC_FEATURE (45)..(45): Xaa at this position is a single (one, 1) amino acid selected from the following options: Val Gly Phe Lys Arg
  MISC_FEATURE (46)..(46): Xaa at this position is a single (one, 1) amino acid selected from the following options: Asp Ala Ser Arg Leu
  MISC_FEATURE (47)..(47): Xaa at this position is a single (one, 1) amino acid selected from the following options: Phe Leu Ile Glu Ser
  MISC_FEATURE (48)..(48): Xaa at this position is a single (one, 1) amino acid selected from the following options: Arg Gly Ala Ile Glu Ser Pro
  MISC_FEATURE (49)..(49): Xaa at this position is a single (one, 1) amino acid selected from the following options: Lys Arg Thr Glu Gln
  MISC_FEATURE (50)..(50): Xaa at this position is a single (one, 1) amino acid selected from the following options: Arg Lys Met
  MISC_FEATURE (51)..(51): Xaa at this position is a single (one, 1) amino acid selected from the following options: Gly Pro Ala Val Leu Ile Met Cys Phe Tyr Trp His Lys Arg Gln Asn Glu Asp Ser Thr
  MISC_FEATURE (52)..(52): Xaa at this position is a single (one, 1) amino acid selected from the following options: Gln Ala Lys Arg Pro Phe Val
  MISC_FEATURE (53)..(53): Xaa at this position is a single (one, 1) amino acid selected from the following options: Ala Ser Arg
  MISC_FEATURE (54)..(54): Xaa at this position is a single (one, 1) amino acid selected from the following options: Lys Glu Asp His Ala Ile
  MISC_FEATURE (55)..(55): Xaa at this position is a single (one, 1) amino acid selected from the following options: Gly Glu Pro Arg
  MISC_FEATURE (56)..(56): Xaa at this position is a single (one, 1) amino acid selected from the following options: Glu Asp Tyr Thr Gln
  MISC_FEATURE (57)..(57): Xaa at this position is a single (one, 1) amino acid selected from the following options: Arg Met Lys
  MISC_FEATURE (58)..(58): Xaa at this position is a single (one, 1) amino acid selected from the following options: Tyr Phe Glu
  MISC_FEATURE (59)..(59): Xaa at this position is a single (one, 1) amino acid selected from the following options: Leu Phe Pro Gln
  MISC_FEATURE (60)..(60): Xaa at this position is a single (one, 1) amino acid selected from the following options: Arg Leu Lys
  MISC_FEATURE (61)..(61): Xaa at this position is a single (one, 1) amino acid selected from the following options: Ala Lys Glu Thr Asp Gln Arg
  MISC_FEATURE (62)..(62): Xaa at this position is a single (one, 1) amino acid selected from the following options: Gln Arg Lys Ala Cys
  MISC_FEATURE (63)..(63): Xaa at this position is a single (one, 1) amino acid selected from the following options: Ser Thr Ala Asn Glu Leu
  MISC_FEATURE (64)..(64): Xaa at this position is a single (one, 1) amino acid selected from the following options: Arg Lys Gln His Ala
  MISC_FEATURE (65)..(65): Xaa at this position is a single (one, 1) amino acid selected from the following options: Glu Gln Lys
  MISC_FEATURE (66)..(66): Xaa at this position is a single (one, 1) amino acid selected from the following options: Gln Lys
  MISC_FEATURE (67)..(67): Xaa at this position is a single (one, 1) amino acid selected from the following options: Leu His Met Glu
  MISC_FEATURE (68)..(68): Xaa at this position is a single (one, 1) amino acid selected from the following options: Ala Leu Glu Thr Asp Ser
  MISC_FEATURE (69)..(69): Xaa at this position is a single (one, 1) amino acid selected from the following options: Ala Thr Arg Ile Ser Asn Val Met Asp
  MISC_FEATURE (70)..(70): Xaa at this position is a single (one, 1) amino acid selected from the following options: Leu Glu
  MISC_FEATURE (71)..(71): Xaa at this position is a single (one, 1) amino acid selected from the following options: Lys Arg Ile
  MISC_FEATURE (72)..(72): Xaa at this position is a single (one, 1) amino acid selected from the following options: Lys Asn Arg Thr Glu
  MISC_FEATURE (73)..(73): Xaa at this position is a single (one, 1) amino acid selected from the following options: Gly Pro Ala Val Leu Ile Met Cys Phe Tyr Trp His Lys Arg Gln Asn Glu Asp Ser Thr
  MISC_FEATURE (74)..(74): Xaa at this position is a single (one, 1) amino acid selected from the following options: Gly Pro Ala Val Leu Ile Met Cys Phe Tyr Trp His Lys Arg Gln Asn Glu Asp Ser Thr
  MISC_FEATURE (75)..(75): Xaa at this position is a single (one, 1) amino acid selected from the following options: Glu Gln Lys Val
  MISC_FEATURE (76)..(76): Xaa at this position is a single (one, 1) amino acid selected from the following options: Glu Asp Asn Lys
  MISC_FEATURE (77)..(77): Xaa at this position is a single (one, 1) amino acid selected from the following options: Glu Val
  MISC_FEATURE (78)..(78): Xaa at this position is a single (one, 1) amino acid selected from the following options: Ile Val
  MISC_FEATURE (79)..(79): Xaa at this position is a single (one, 1) amino acid selected from the following options: Val Thr Ser Asp Asn Gly Ala Glu Gln Tyr Arg
  MISC_FEATURE (80)..(80): Xaa at this position is a single (one, 1) amino acid selected from the following options: Gly Pro Ala Val Leu Ile Met Cys Phe Tyr Trp His Lys Arg Gln Asn Glu Asp Ser Thr
  MISC_FEATURE (81)..(81): Xaa at this position is a single (one, 1) amino acid selected from the following options: Gly Pro Ala Val Leu Ile Met Cys Phe Tyr Trp His Lys Arg Gln Asn Glu Asp Ser Thr
  MISC_FEATURE (82)..(82): Xaa at this position is a single (one, 1) amino acid selected from the following options: Lys Ser Met Val His Ala Arg Gln Glu Ile Leu Val
  MISC_FEATURE (83)..(83): Xaa at this position is a single (one, 1) amino acid selected from the following options: Lys Glu Gln Arg Gly
  MISC_FEATURE (84)..(84): Xaa at this position is a single (one, 1) amino acid selected from the following options: Glu Ala Gln
  MISC_FEATURE (86)..(86): Xaa at this position is a single (one, 1) amino acid selected from the following options: Glu Lys Asp Gln
  MISC_FEATURE (87)..(87): Xaa at this position is a single (one, 1) amino acid selected from the following options: Arg His Leu Gln Cys Val Gln
  MISC_FEATURE (88)..(88): Xaa at this position is a single (one, 1) amino acid selected from the following options: Leu Met
  MISC_FEATURE (89)..(89): Xaa at this position is a single (one, 1) amino acid selected from the following options: Gln Glu Lys
  MISC_FEATURE (90)..(90): Xaa at this position is a single (one, 1) amino acid selected from the following options: Lys Asn Arg Gln
  MISC_FEATURE (91)..(91): Xaa at this position is a single (one, 1) amino acid selected from the following options: Glu Gln Asn
  MISC_FEATURE (92)..(92): Xaa at this position is a single (one, 1) amino acid selected from the following options: Ile Met
  MISC_FEATURE (93)..(93): Xaa at this position is a single (one, 1) amino acid selected from the following options: Glu Gln Asp Ile Lys
  MISC_FEATURE (94)..(94): Xaa at this position is a single (one, 1) amino acid selected from the following options: Arg Gln Lys Glu
  MISC_FEATURE (95)..(95): Xaa at this position is a single (one, 1) amino acid selected from the following options: His Leu Ile
  MISC_FEATURE (96)..(96): Xaa at this position is a single (one, 1) amino acid selected from the following options: Lys Gln Glu
  MISC_FEATURE (97)..(97): Xaa at this position is a single (one, 1) amino acid selected from the following options: Gln Lys Glu Tyr Gly Ser His Asp Asn
  MISC_FEATURE (98)..(98): Xaa at this position is a single (one, 1) amino acid selected from the following options: Lys Arg Ser Ala Asn Thr His Ser Leu
  MISC_FEATURE (99)..(99): Xaa at this position is a single (one, 1) amino acid selected from the following options: Ile Met Asp Val
  MISC_FEATURE (100)..(100): Xaa at this position is a single (one, 1) amino acid selected from the following options: Lys Gln Arg Asn
  MISC_FEATURE (101)..(101): Xaa at this position is a single (one, 1) amino acid selected from the following options: Met Thr Lys His Tyr Ser Gln Ile Val Asn Asp Arg
  MISC_FEATURE (103)..(103): Xaa at this position is a single (one, 1) amino acid selected from the following options: Lys Asn Ser His Arg Thr Gly
  MISC_FEATURE (104)..(104): Xaa at this position is a single (one, 1) amino acid selected from the following options: His Asp Asn Ser Arg Gln Glu Tyr Asn Leu Gln Gly
  MISC_FEATURE (105)..(105): Xaa at this position is a single (one, 1) amino acid selected from the following options: Asp His Ser Asn Ile or is absent (no amino acid at this position and so this position is not present)
  MISC_FEATURE (106)..(106): Xaa at this position is a single (one, 1) amino acid selected from the following options: Asp Glu His Gly Asn or is absent (no amino acid at this position and so this position is not present)
  MISC_FEATURE (107)..(107): Xaa at this position is a single (one, 1) amino acid selected from the following options: Asp His or is absent (no amino acid at this position and so this position is not present)
  MISC_FEATURE (108)..(108): Xaa at this position is a single (one, 1) amino acid selected from the following options: Asp Glu or is absent (no amino acid at this position and so this position is not present)
  MISC_FEATURE (109)..(109): Asp or is absent (no amino acid at this position and so this position is not present)
  MISC_FEATURE (110)..(110): Asp or is absent (no amino acid at this position and so this position is not present)
  MISC_FEATURE (111)..(111): Asp or is absent (no amino acid at this position and so this position is not present)
  MISC_FEATURE (112)..(112): Asp or is absent (no amino acid at this position and so this position is not present)
  MISC_FEATURE (113)..(113): Asp or is absent (no amino acid at this position and so this position is not present)
  MISC_FEATURE (114)..(114): Asp or is absent (no amino acid at this position and so this position is not present)
  MISC_FEATURE (115)..(115): Asp or is absent (no amino acid at this position and so this position is not present)
MAXXXXXXXXXXXXXXXXXXXXXXXXXXXXXXXXXXXXAXXXXXXXXXXXXXXXXXXXXXXXXXXXXXXXXXXXXXXXXXXXXXIXXXXXXXXXXXXXXXXLXXXXXXXXXXXXX

SEQ ID NO: 90 - protein, 109 aa, Artificial Sequence
  Designed; as detailed elsewhere in present application
  MISC_FEATURE (3)..(3): Xaa at this position is a single (one, 1) amino acid selected from the following options: Val Gly Ala Thr
  MISC_FEATURE (4)..(4): Xaa at this position is a single (one, 1) amino acid selected from the following options: Thr Ser Pro
  MISC_FEATURE (5)..(5): Xaa at this position is a single (one, 1) amino acid selected from the following options: Ala Val Glu
  MISC_FEATURE (6)..(6): Xaa at this position is a single (one, 1) amino acid selected from the following options: Leu Thr Gln
  MISC_FEATURE (7)..(7): Xaa at this position is a single (one, 1) amino acid selected from the following options: Ala Val
  MISC_FEATURE (8)..(8): Xaa at this position is a single (one, 1) amino acid selected from the following options: Ala Val Leu Ile Thr
  MISC_FEATURE (9)..(9): Xaa at this position is a single (one, 1) amino acid selected from the following options: Arg Gln Trp
  MISC_FEATURE (10)..(10): Xaa at this position is a single (one, 1) amino acid selected from the following options: Thr Val Met Ala Ser Leu
  MISC_FEATURE (11)..(11): Xaa at this position is a single (one, 1) amino acid selected from the following options: Trp Arg Gln
  MISC_FEATURE (12)..(12): Xaa at this position is a single (one, 1) amino acid selected from the following options: Leu Phe Gln
  MISC_FEATURE (13)..(13): Xaa at this position is a single (one, 1) amino acid selected from the following options: Gly Tyr Cys Ala Arg
  MISC_FEATURE (14)..(14): Xaa at this position is a single (one, 1) amino acid selected from the following options: Val Ser Ala Thr Met Arg
  MISC_FEATURE (15)..(15): Xaa at this position is a single (one, 1) amino acid selected from the following options: Trp Leu
  MISC_FEATURE (16)..(16): Xaa at this position is a single (one, 1) amino acid selected from the following options: Gly Ser
  MISC_FEATURE (17)..(17): Xaa at this position is a single (one, 1) amino acid selected from the following options: Val Ala Met
  MISC_FEATURE (18)..(18): Xaa at this position is a single (one, 1) amino acid selected from the following options: Arg Trp Lys Leu
  MISC_FEATURE (19)..(19): Xaa at this position is a single (one, 1) amino acid selected from the following options: Thr Ala Val Ser
  MISC_FEATURE (20)..(20): Xaa at this position is a single (one, 1) amino acid selected from the following options: Met Leu Ile Arg Val Ala Thr
  MISC_FEATURE (21)..(21): Xaa at this position is a single (one, 1) amino acid selected from the following options: Gln Arg
  MISC_FEATURE (22)..(22): Xaa at this position is a single (one, 1) amino acid selected from the following options: Ala Thr Gly Ser
  MISC_FEATURE (23)..(23): Xaa at this position is a single (one, 1) amino acid selected from the following options: Arg Gln Gly Leu
  MISC_FEATURE (24)..(24): Xaa at this position is a single (one, 1) amino acid selected from the following options: Gly Ser
  MISC_FEATURE (25)..(25): Xaa at this position is a single (one, 1) amino acid selected from the following options: Phe Tyr
  MISC_FEATURE (26)..(26): Xaa at this position is a single (one, 1) amino acid selected from the following options: Gly Ser Val Ala Thr
  MISC_FEATURE (27)..(27): Xaa at this position is a single (one, 1) amino acid selected from the following options: Ser Cys Arg
  MISC_FEATURE (28)..(28): Xaa at this position is a single (one, 1) amino acid selected from the following options: Asp Glu Gly Ser
  MISC_FEATURE (29)..(29): Xaa at this position is a single (one, 1) amino acid selected from the following options: Gln Arg Ser Thr Lys Pro
  MISC_FEATURE (30)..(30): Xaa at this position is a single (one, 1) amino acid selected from the following options: Ser Pro Ala Gly
  MISC_FEATURE (31)..(31): Xaa at this position is a single (one, 1) amino acid selected from the following options: Glu Asp Lys His Ala Gly Asn
  MISC_FEATURE (32)..(32): Xaa at this position is a single (one, 1) amino acid selected from the following options: Asn Asp Tyr Ser Gly Arg His
  MISC_FEATURE (33)..(33): Xaa at this position is a single (one, 1) amino acid selected from the following options: Val Leu Pro His Met Ile Phe Thr Gly
  MISC_FEATURE (34)..(34): Xaa at this position is a single (one, 1) amino acid selected from the following options: Asp Gly His Arg Ser Glu
  MISC_FEATURE (35)..(35): Xaa at this position is a single (one, 1) amino acid selected from the following options: Arg Ser Gly Thr Pro Ala
  MISC_FEATURE (36)..(36): Xaa at this position is a single (one, 1) amino acid selected from the following options: Gly Ser Arg Pro Lys Asp Arg Thr
  MISC_FEATURE (37)..(37): Xaa at this position is a single (one, 1) amino acid selected from the following options: Ala Glu Ser Glu
  MISC_FEATURE (38)..(38): Xaa at this position is a single (one, 1) amino acid selected from the following options: Gly Ala
  MISC_FEATURE (40)..(40): Xaa at this position is a single (one, 1) amino acid selected from the following options: Ile Val
  MISC_FEATURE (41)..(41): Xaa at this position is a single (one, 1) amino acid selected from the following options: Arg Lys Trp
  MISC_FEATURE (42)..(42): Xaa at this position is a single (one, 1) amino acid selected from the following options: Glu Asp Asn
  MISC_FEATURE (45)..(45): Xaa at this position is a single (one, 1) amino acid selected from the following options: Gly Val
  MISC_FEATURE (46)..(46): Xaa at this position is a single (one, 1) amino acid selected from the following options: Ala Ser Asp
  MISC_FEATURE (48)..(48): Xaa at this position is a single (one, 1) amino acid selected from the following options: Gly Ala Arg
  MISC_FEATURE (49)..(49): Xaa at this position is a single (one, 1) amino acid selected from the following options: Lys Arg
  MISC_FEATURE (50)..(50): Xaa at this position is a single (one, 1) amino acid selected from the following options: Arg Lys
  MISC_FEATURE (51)..(51): Xaa at this position is a single (one, 1) amino acid selected from the following options: Gly Pro Ala Val Leu Ile Met Cys Phe Tyr Trp His Lys Arg Gln Asn Glu Asp Ser Thr
  MISC_FEATURE (52)..(52): Xaa at this position is a single (one, 1) amino acid selected from the following options: Gln Ala Lys Arg
  MISC_FEATURE (53)..(53): Xaa at this position is a single (one, 1) amino acid selected from the following options: Ala Ser
  MISC_FEATURE (54)..(54): Xaa at this position is a single (one, 1) amino acid selected from the following options: Glu Asp Lys
  MISC_FEATURE (55)..(55): Xaa at this position is a single (one, 1) amino acid selected from the following options: Glu Gly
  MISC_FEATURE (56)..(56): Xaa at this position is a single (one, 1) amino acid selected from the following options: Glu Asp
  MISC_FEATURE (59)..(59): Xaa at this position is a single (one, 1) amino acid selected from the following options: Phe Leu
  MISC_FEATURE (60)..(60): Xaa at this position is a single (one, 1) amino acid selected from the following options: Arg Leu
  MISC_FEATURE (61)..(61): Xaa at this position is a single (one, 1) amino acid selected from the following options: Ala Lys Glu Thr
  MISC_FEATURE (62)..(62): Xaa at this position is a single (one, 1) amino acid selected from the following options: Gln Arg Lys
  MISC_FEATURE (63)..(63): Xaa at this position is a single (one, 1) amino acid selected from the following options: Ser Thr Ala Asn
  MISC_FEATURE (64)..(64): Xaa at this position is a single (one, 1) amino acid selected from the following options: Arg Lys
  MISC_FEATURE (65)..(65): Xaa at this position is a single (one, 1) amino acid selected from the following options: Glu Gln
  MISC_FEATURE (68)..(68): Xaa at this position is a single (one, 1) amino acid selected from the following options: Ala Leu Glu Thr
  MISC_FEATURE (69)..(69): Xaa at this position is a single (one, 1) amino acid selected from the following options: Ala Thr Arg Ile
  MISC_FEATURE (71)..(71): Xaa at this position is a single (one, 1) amino acid selected from the following options: Lys Arg
  MISC_FEATURE (73)..(73): Xaa at this position is a single (one, 1) amino acid selected from the following options: Gly Pro Ala Val Leu Ile Met Cys Phe Tyr Trp His Lys Arg Gln Asn Glu Asp Ser Thr
  MISC_FEATURE (76)..(76): Xaa at this position is a single (one, 1) amino acid selected from the following options: Glu Asp Asn
  MISC_FEATURE (78)..(78): Xaa at this position is a single (one, 1) amino acid selected from the following options: Ile Val
  MISC_FEATURE (79)..(79): Xaa at this position is a single (one, 1) amino acid selected from the following options: Val Thr Ser Asp Asn Gly Ala Glu Gln
  MISC_FEATURE (80)..(80): Xaa at this position is a single (one, 1) amino acid selected from the following options: Gly Pro Ala Val Leu Ile Met Cys Phe Tyr Trp His Lys Arg Gln Asn Glu Asp Ser Thr
  MISC_FEATURE (81)..(81): Xaa at this position is a single (one, 1) amino acid selected from the following options: Gly Pro Ala Val Leu Ile Met Cys Phe Tyr Trp His Lys Arg Gln Asn Glu Asp Ser Thr
  MISC_FEATURE (82)..(82): Xaa at this position is a single (one, 1) amino acid selected from the following options: Lys Ser Met Val His Ala Arg Gln Glu
  MISC_FEATURE (83)..(83): Xaa at this position is a single (one, 1) amino acid selected from the following options: Lys Glu Gln Arg
  MISC_FEATURE (86)..(86): Xaa at this position is a single (one, 1) amino acid selected from the following options: Glu Lys
  MISC_FEATURE (87)..(87): Xaa at this position is a single (one, 1) amino acid selected from the following options: Arg His
  MISC_FEATURE (90)..(90): Xaa at this position is a single (one, 1) amino acid selected from the following options: Lys Asn
  MISC_FEATURE (91)..(91): Xaa at this position is a single (one, 1) amino acid selected from the following options: Glu Gln
  MISC_FEATURE (93)..(93): Xaa at this position is a single (one, 1) amino acid selected from the following options: Glu Gln
  MISC_FEATURE (94)..(94): Xaa at this position is a single (one, 1) amino acid selected from the following options: Arg Gln
  MISC_FEATURE (96)..(96): Xaa at this position is a single (one, 1) amino acid selected from the following options: Lys Gln
  MISC_FEATURE (97)..(97): Xaa at this position is a single (one, 1) amino acid selected from the following options: Gln Lys Glu
  MISC_FEATURE (98)..(98): Xaa at this position is a single (one, 1) amino acid selected from the following options: Lys Arg Ser Ala Asn Thr
  MISC_FEATURE (99)..(99): Xaa at this position is a single (one, 1) amino acid selected from the following options: Ile Met
  MISC_FEATURE (100)..(100): Xaa at this position is a single (one, 1) amino acid selected from the following options: Lys Gln
  MISC_FEATURE (101)..(101): Xaa at this position is a single (one, 1) amino acid selected from the following options: Met Thr Lys His Tyr Ser Gln Ile Val Asn
  MISC_FEATURE (103)..(103): Xaa at this position is a single (one, 1) amino acid selected from the following options: Lys Asn Ser His
  MISC_FEATURE (104)..(104): Xaa at this position is a single (one, 1) amino acid selected from the following options: His Asp Asn Ser Arg Gln Glu Tyr
  MISC_FEATURE (105)..(105): Xaa at this position is a single (one, 1) amino acid selected from the following options: Asp His Ser Asn Ile
  MISC_FEATURE (106)..(106): Xaa at this position is a single (one, 1) amino acid selected from the following options: Asp Glu His Gly or is absent (no amino acid at this position and so this position is not present)
  MISC_FEATURE (107)..(107): Xaa at this position is a single (one, 1) amino acid selected from the following options: Asp His or is absent (no amino acid at this position and so this position is not present)
  MISC_FEATURE (108)..(108): Xaa at this position is a single (one, 1) amino acid selected from the following options: Asp or is absent (no amino acid at this position and so this position is not present)
  MISC_FEATURE (109)..(109): Xaa at this position is a single (one, 1) amino acid selected from the following options: Asp or is absent (no amino acid at this position and so this position is not present)
MAXXXXXXXXXXXXXXXXXXXXXXXXXXXXXXXXXXXXAXXXAGXXFXXXXXXXXXRYXXXXXXXQLXXLXKXKEXEXXXXXXEIXXLQXXIXXHXXXXXXLXXXXXXX

SEQ ID NO: 91 - protein, 109 aa, Artificial Sequence
  Designed; as detailed elsewhere in present application
  MISC_FEATURE (3)..(3): Xaa at this position is a single (one, 1) amino acid selected from the following options: Val Ala
  MISC_FEATURE (7)..(7): Xaa at this position is a single (one, 1) amino acid selected from the following options: Ala Val
  MISC_FEATURE (11)..(11): Xaa at this position is a single (one, 1) amino acid selected from the following options: Trp Arg
  MISC_FEATURE (12)..(12): Xaa at this position is a single (one, 1) amino acid selected from the following options: Leu Phe
  MISC_FEATURE (16)..(16): Xaa at this position is a single (one, 1) amino acid selected from the following options: Gly Ser
  MISC_FEATURE (18)..(18): Xaa at this position is a single (one, 1) amino acid selected from the following options: Arg Trp
  MISC_FEATURE (19)..(19): Xaa at this position is a single (one, 1) amino acid selected from the following options: Thr Ala
  MISC_FEATURE (22)..(22): Xaa at this position is a single (one, 1) amino acid selected from the following options: Ala Gly
  MISC_FEATURE (28)..(28): Xaa at this position is a single (one, 1) amino acid selected from the following options: Asp Glu
  MISC_FEATURE (29)..(29): Xaa at this position is a single (one, 1) amino acid selected from the following options: Gln Ser
  MISC_FEATURE (30)..(30): Xaa at this position is a single (one, 1) amino acid selected from the following options: Ser Ala
  MISC_FEATURE (31)..(31): Xaa at this position is a single (one, 1) amino acid selected from the following options: Glu Asp
  MISC_FEATURE (33)..(33): Xaa at this position is a single (one, 1) amino acid selected from the following options: Val Leu
  MISC_FEATURE (34)..(34): Xaa at this position is a single (one, 1) amino acid selected from the following options: Asp Gly
  MISC_FEATURE (35)..(35): Xaa at this position is a single (one, 1) amino acid selected from the following options: Arg Ser
  MISC_FEATURE (36)..(36): Xaa at this position is a single (one, 1) amino acid selected from the following options: Gly Ser
  MISC_FEATURE (40)..(40): Xaa at this position is a single (one, 1) amino acid selected from the following options: Ile Val
  MISC_FEATURE (42)..(42): Xaa at this position is a single (one, 1) amino acid selected from the following options: Glu Asp
  MISC_FEATURE (50)..(50): Xaa at this position is a single (one, 1) amino acid selected from the following options: Arg Lys
  MISC_FEATURE (51)..(51): Xaa at this position is a single (one, 1) amino acid selected from the following options: Gly Pro Ala Val Leu Ile Met Cys Phe Tyr Trp His Lys Arg Gln Asn Glu Asp Ser Thr
  MISC_FEATURE (54)..(54): Xaa at this position is a single (one, 1) amino acid selected from the following options: Glu Asp
  MISC_FEATURE (56)..(56): Xaa at this position is a single (one, 1) amino acid selected from the following options: Glu Asp
  MISC_FEATURE (62)..(62): Xaa at this position is a single (one, 1) amino acid selected from the following options: Gln Arg
  MISC_FEATURE (63)..(63): Xaa at this position is a single (one, 1) amino acid selected from the following options: Ser Thr Ala
  MISC_FEATURE (64)..(64): Xaa at this position is a single (one, 1) amino acid selected from the following options: Arg Lys
  MISC_FEATURE (71)..(71): Xaa at this position is a single (one, 1) amino acid selected from the following options: Lys Arg
  MISC_FEATURE (73)..(73): Xaa at this position is a single (one, 1) amino acid selected from the following options: Gly Pro Ala Val Leu Ile Met Cys Phe Tyr Trp His Lys Arg Gln Asn Glu Asp Ser Thr
  MISC_FEATURE (76)..(76): Xaa at this position is a single (one, 1) amino acid selected from the following options: Glu Asp Asn
  MISC_FEATURE (79)..(79): Xaa at this position is a single (one, 1) amino acid selected from the following options: Val Ser
  MISC_FEATURE (80)..(80): Xaa at this position is a single (one, 1) amino acid selected from the following options: Gly Pro Ala Val Leu Ile Met Cys Phe Tyr Trp His Lys Arg Gln Asn Glu Asp Ser Thr
  MISC_FEATURE (81)..(81): Xaa at this position is a single (one, 1) amino acid selected from the following options: Gly Pro Ala Val Leu Ile Met Cys Phe Tyr Trp His Lys Arg Gln Asn Glu Asp Ser Thr
  MISC_FEATURE (82)..(82): Xaa at this position is a single (one, 1) amino acid selected from the following options: Lys Val Met
  MISC_FEATURE (87)..(87): Xaa at this position is a single (one, 1) amino acid selected from the following options: Arg His
  MISC_FEATURE (91)..(91): Xaa at this position is a single (one, 1) amino acid selected from the following options: Glu Gln
  MISC_FEATURE (98)..(98): Xaa at this position is a single (one, 1) amino acid selected from the following options: Lys Ser
  MISC_FEATURE (101)..(101): Xaa at this position is a single (one, 1) amino acid selected from the following options: Met Thr Lys
  MISC_FEATURE (106)..(106): Asp or is absent (no amino acid at this position and so this position is not present)
  MISC_FEATURE (107)..(107): Asp or is absent (no amino acid at this position and so this position is not present)
  MISC_FEATURE (108)..(108): Asp or is absent (no amino acid at this position and so this position is not present)
  MISC_FEATURE (109)..(109): Asp or is absent (no amino acid at this position and so this position is not present)
MAXTALXARTXXGVWXVXXMQXRGFGSXXXXNXXXXAGAXRXAGGAFGKXXQAXEXRYFRAXXXEQLAALXKXKEXEIXXXXKEIEXLQKXIERHKQXIKXLKHDXXXX

SEQ ID NO: 92 - protein, 107 aa, Artificial Sequence
  Designed; as detailed elsewhere in present application
  misc_feature (3)..(3): Xaa at this position is a single (one, 1) amino acid selected from the following options: Ala Thr Val
  misc_feature (4)..(4): Xaa at this position is a single (one, 1) amino acid selected from the following options: Thr Ser
  misc_feature (5)..(5): Xaa at this position is a single (one, 1) amino acid selected from the following options: Ala Glu
  misc_feature (7)..(7): Xaa at this position is a single (one, 1) amino acid selected from the following options: Ala Val
  misc_feature (9)..(9): Xaa at this position is a single (one, 1) amino acid selected from the following options: Arg Trp
  misc_feature (10)..(10): Xaa at this position is a single (one, 1) amino acid selected from the following options: Thr Met
  misc_feature (11)..(11): Xaa at this position is a single (one, 1) amino acid selected from the following options: Arg Gln Trp
  misc_feature (12)..(12): Xaa at this position is a single (one, 1) amino acid selected from the following options: Phe Leu
  misc_feature (13)..(13): Xaa at this position is a single (one, 1) amino acid selected from the following options: Gly Arg Tyr Cys
  misc_feature (14)..(14): Xaa at this position is a single (one, 1) amino acid selected from the following options: Val Ser Ala Met
  misc_feature (15)..(15): Xaa at this position is a single (one, 1) amino acid selected from the following options: Trp Leu
  misc_feature (16)..(16): Xaa at this position is a single (one, 1) amino acid selected from the following options: Ser Gly
  misc_feature (17)..(17): Xaa at this position is a single (one, 1) amino acid selected from the following options: Val Ala
  misc_feature (18)..(18): Xaa at this position is a single (one, 1) amino acid selected from the following options: Trp Arg
  misc_feature (19)..(19): Xaa at this position is a single (one, 1) amino acid selected from the following options: Ala Thr Val
  misc_feature (20)..(20): Xaa at this position is a single (one, 1) amino acid selected from the following options: Met Val Arg
  misc_feature (22)..(22): Xaa at this position is a single (one, 1) amino acid selected from the following options: Gly Ala Thr
  misc_feature (23)..(23): Xaa at this position is a single (one, 1) amino acid selected from the following options: Arg Leu Gln
  misc_feature (24)..(24): Xaa at this position is a single (one, 1) amino acid selected from the following options: Gly Ser
  misc_feature (26)..(26): Xaa at this position is a single (one, 1) amino acid selected from the following options: Gly Ser
  misc_feature (28)..(28): Xaa at this position is a single (one, 1) amino acid selected from the following options: Glu Asp
  misc_feature (29)..(29): Xaa at this position is a single (one, 1) amino acid selected from the following options: Ser Gln Pro
  misc_feature (30)..(30): Xaa at this position is a single (one, 1) amino acid selected from the following options: Ala Ser Pro
  misc_feature (31)..(31): Xaa at this position is a single (one, 1) amino acid selected from the following options: Asp Glu His
  misc_feature (32)..(32): Xaa at this position is a single (one, 1) amino acid selected from the following options: Asn Asp
  misc_feature (33)..(33): Xaa at this position is a single (one, 1) amino acid selected from the following options: Leu Val
  misc_feature (34)..(34): Xaa at this position is a single (one, 1) amino acid selected from the following options: Gly Asp Arg
  misc_feature (35)..(35): Xaa at this position is a single (one, 1) amino acid selected from the following options: Ser Arg
  misc_feature (36)..(36): Xaa at this position is a single (one, 1) amino acid selected from the following options: Ser Gly Thr Arg
  misc_feature (37)..(37): Xaa at this position is a single (one, 1) amino acid selected from the following options: Ala Glu Ser
  misc_feature (38)..(38): Xaa at this position is a single (one, 1) amino acid selected from the following options: Gly Ala
  misc_feature (40)..(40): Xaa at this position is a single (one, 1) amino acid selected from the following options: Ile Val
  misc_feature (41)..(41): Xaa at this position is a single (one, 1) amino acid selected from the following options: Arg Trp
  misc_feature (42)..(42): Xaa at this position is a single (one, 1) amino acid selected from the following options: Asp Asn Glu
  misc_feature (45)..(45): Xaa at this position is a single (one, 1) amino acid selected from the following options: Gly Val
  misc_feature (46)..(46): Xaa at this position is a single (one, 1) amino acid selected from the following options: Ala Asp
  misc_feature (48)..(48): Xaa at this position is a single (one, 1) amino acid selected from the following options: Gly Arg Ala
  misc_feature (50)..(50): Xaa at this position is a single (one, 1) amino acid selected from the following options: Lys Arg
  misc_feature (51)..(51): Xaa at this position is a single (one, 1) amino acid selected from the following options: Gly Pro Ala Val Leu Ile Met Cys Phe Tyr Trp His Lys Arg Gln Asn Glu Asp Ser Thr
  misc_feature (52)..(52): Xaa at this position is a single (one, 1) amino acid selected from the following options: Gln Ala
  misc_feature (54)..(54): Xaa at this position is a single (one, 1) amino acid selected from the following options: Glu Lys
  misc_feature (55)..(55): Xaa at this position is a single (one, 1) amino acid selected from the following options: Glu Gly
  misc_feature (59)..(59): Xaa at this position is a single (one, 1) amino acid selected from the following options: Phe Leu
  misc_feature (62)..(62): Xaa at this position is a single (one, 1) amino acid selected from the following options: Arg Gln
  misc_feature (63)..(63): Xaa at this position is a single (one, 1) amino acid selected from the following options: Ala Ser Thr
  misc_feature (64)..(64): Xaa at this position is a single (one, 1) amino acid selected from the following options: Lys Arg
  misc_feature (68)..(68): Xaa at this position is a single (one, 1) amino acid selected from the following options: Ala Thr
  misc_feature (69)..(69): Xaa at this position is a single (one, 1) amino acid selected from the following options: Ala Thr
  misc_feature (73)..(73): Xaa at this position is a single (one, 1) amino acid selected from the following options: Gly Pro Ala Val Leu Ile Met Cys Phe Tyr Trp His Lys Arg Gln Asn Glu Asp Ser Thr
  misc_feature (76)..(76): Xaa at this position is a single (one, 1) amino acid selected from the following options: Asn Glu Asp
  misc_feature (79)..(79): Xaa at this position is a single (one, 1) amino acid selected from the following options: Ser Thr Gly Val
  misc_feature (80)..(80): Xaa at this position is a single (one, 1) amino acid selected from the following options: Gly Pro Ala Val Leu Ile Met Cys Phe Tyr Trp His Lys Arg Gln Asn Glu Asp Ser Thr
  misc_feature (81)..(81): Xaa at this position is a single (one, 1) amino acid selected from the following options: Gly Pro Ala Val Leu Ile Met Cys Phe Tyr Trp His Lys Arg Gln Asn Glu Asp Ser Thr
  misc_feature (82)..(82): Xaa at this position is a single (one, 1) amino acid selected from the following options: Val Met Lys Glu
  misc_feature (87)..(87): Xaa at this position is a single (one, 1) amino acid selected from the following options: His Arg
  misc_feature (90)..(90): Xaa at this position is a single (one, 1) amino acid selected from the following options: Lys Asn
  misc_feature (98)..(98): Xaa at this position is a single (one, 1) amino acid selected from the following options: Ser Lys
  misc_feature (101)..(101): Xaa at this position is a single (one, 1) amino acid selected from the following options: Lys Met Ile Thr
  misc_feature (104)..(104): Xaa at this position is a single (one, 1) amino acid selected from the following options: His Gln Arg Asp
  misc_feature (105)..(105): Xaa at this position is a single (one, 1) amino acid selected from the following options: Asp Asn
  misc_feature (107)..(107): Asp or is absent (no amino acid at this position and so this position is not present)
MAXXXLXAXXXXXXXXXXXXQXXXFXSXXXXXXXXXXXAXXXAGXXFXKXXXAXXERYXRAXXXEQLXXLKKXKEXEIXXXXKEIEXLQXEIERHKQXIKXLKXXDX

SEQ ID NO: 93 - protein, 107 aa, Artificial Sequence
  Designed; as detailed elsewhere in present application
  MISC_FEATURE (11)..(11): Xaa at this position is a single (one, 1) amino acid selected from the following options: Arg Trp
  MISC_FEATURE (12)..(12): Xaa at this position is a single (one, 1) amino acid selected from the following options: Phe Leu
  MISC_FEATURE (16)..(16): Xaa at this position is a single (one, 1) amino acid selected from the following options: Ser Gly
  MISC_FEATURE (18)..(18): Xaa at this position is a single (one, 1) amino acid selected from the following options: Trp Arg
  MISC_FEATURE (19)..(19): Xaa at this position is a single (one, 1) amino acid selected from the following options: Ala Thr
  MISC_FEATURE (22)..(22): Xaa at this position is a single (one, 1) amino acid selected from the following options: Gly Ala
  MISC_FEATURE (28)..(28): Xaa at this position is a single (one, 1) amino acid selected from the following options: Glu Asp
  MISC_FEATURE (29)..(29): Xaa at this position is a single (one, 1) amino acid selected from the following options: Ser Gln
  MISC_FEATURE (30)..(30): Xaa at this position is a single (one, 1) amino acid selected from the following options: Ala Ser
  MISC_FEATURE (31)..(31): Xaa at this position is a single (one, 1) amino acid selected from the following options: Asp Glu
  MISC_FEATURE (34)..(34): Xaa at this position is a single (one, 1) amino acid selected from the following options: Gly Asp
  MISC_FEATURE (35)..(35): Xaa at this position is a single (one, 1) amino acid selected from the following options: Ser Arg
  MISC_FEATURE (36)..(36): Xaa at this position is a single (one, 1) amino acid selected from the following options: Ser Gly
  MISC_FEATURE (40)..(40): Xaa at this position is a single (one, 1) amino acid selected from the following options: Ile Val
  MISC_FEATURE (42)..(42): Xaa at this position is a single (one, 1) amino acid selected from the following options: Asp Glu
  MISC_FEATURE (50)..(50): Xaa at this position is a single (one, 1) amino acid selected from the following options: Lys Arg
  MISC_FEATURE (51)..(51): Xaa at this position is a single (one, 1) amino acid selected from the following options: Gly Pro Ala Val Leu Ile Met Cys Phe Tyr Trp His Lys Arg Gln Asn Glu Asp Ser Thr
  MISC_FEATURE (62)..(62): Xaa at this position is a single (one, 1) amino acid selected from the following options: Arg Gln
  MISC_FEATURE (64)..(64): Xaa at this position is a single (one, 1) amino acid selected from the following options: Lys Arg
  MISC_FEATURE (73)..(73): Xaa at this position is a single (one, 1) amino acid selected from the following options: Gly Pro Ala Val Leu Ile Met Cys Phe Tyr Trp His Lys Arg Gln Asn Glu Asp Ser Thr
  MISC_FEATURE (76)..(76): Xaa at this position is a single (one, 1) amino acid selected from the following options: Asn Glu Asp
  MISC_FEATURE (79)..(79): Xaa at this position is a single (one, 1) amino acid selected from the following options: Ser Val
  MISC_FEATURE (80)..(80): Xaa at this position is a single (one, 1) amino acid selected from the following options: Gly Pro Ala Val Leu Ile Met Cys Phe Tyr Trp His Lys Arg Gln Asn Glu Asp Ser Thr
  MISC_FEATURE (81)..(81): Xaa at this position is a single (one, 1) amino acid selected from the following options: Gly Pro Ala Val Leu Ile Met Cys Phe Tyr Trp His Lys Arg Gln Asn Glu Asp Ser Thr
  MISC_FEATURE (82)..(82): Xaa at this position is a single (one, 1) amino acid selected from the following options: Val Met Lys
  MISC_FEATURE (87)..(87): Xaa at this position is a single (one, 1) amino acid selected from the following options: His Arg
  MISC_FEATURE (98)..(98): Xaa at this position is a single (one, 1) amino acid selected from the following options: Ser Lys
MAATALAARTXXGVWXVXXMQXRGFGSXXXXNLXXXAGAXRXAGGAFGKXXQAEEERYFRAXAXEQLAALKKXKEXEIXXXXKEIEXLQKEIERHKQXIKKLKHDDD

SEQ ID NO: 94 - protein, 108 aa, Artificial Sequence
  Designed; as detailed elsewhere in present application
  MISC_FEATURE (3)..(3): Xaa at this position is a single (one, 1) amino acid selected from the following options: Val Ala Thr
  MISC_FEATURE (4)..(4): Xaa at this position is a single (one, 1) amino acid selected from the following options: Thr Val
  MISC_FEATURE (5)..(5): Xaa at this position is a single (one, 1) amino acid selected from the following options: Ala Glu
  MISC_FEATURE (7)..(7): Xaa at this position is a single (one, 1) amino acid selected from the following options: Ala Val
  MISC_FEATURE (9)..(9): Xaa at this position is a single (one, 1) amino acid selected from the following options: Arg Trp
  MISC_FEATURE (10)..(10): Xaa at this position is a single (one, 1) amino acid selected from the following options: Thr Met Val
  MISC_FEATURE (11)..(11): Xaa at this position is a single (one, 1) amino acid selected from the following options: Arg Trp Gln
  MISC_FEATURE (12)..(12): Xaa at this position is a single (one, 1) amino acid selected from the following options: Leu Phe
  MISC_FEATURE (13)..(13): Xaa at this position is a single (one, 1) amino acid selected from the following options: Gly Arg Tyr Cys
  MISC_FEATURE (14)..(14): Xaa at this position is a single (one, 1) amino acid selected from the following options: Val Ser Ala
  MISC_FEATURE (15)..(15): Xaa at this position is a single (one, 1) amino acid selected from the following options: Trp Leu
  MISC_FEATURE (16)..(16): Xaa at this position is a single (one, 1) amino acid selected from the following options: Gly Ser
  MISC_FEATURE (17)..(17): Xaa at this position is a single (one, 1) amino acid selected from the following options: Val Ala
  MISC_FEATURE (18)..(18): Xaa at this position is a single (one, 1) amino acid selected from the following options: Trp Arg
  MISC_FEATURE (19)..(19): Xaa at this position is a single (one, 1) amino acid selected from the following options: Ala Thr Val
  MISC_FEATURE (20)..(20): Xaa at this position is a single (one, 1) amino acid selected from the following options: Met Val
  MISC_FEATURE (22)..(22): Xaa at this position is a single (one, 1) amino acid selected from the following options: Gly Ala
  MISC_FEATURE (23)..(23): Xaa at this position is a single (one, 1) amino acid selected from the following options: Arg Gln Leu
  MISC_FEATURE (24)..(24): Xaa at this position is a single (one, 1) amino acid selected from the following options: Gly Met
  MISC_FEATURE (25)..(25): Xaa at this position is a single (one, 1) amino acid selected from the following options: Phe Gln
  MISC_FEATURE (26)..(26): Xaa at this position is a single (one, 1) amino acid selected from the following options: Gly Ser
  MISC_FEATURE (28)..(28): Xaa at this position is a single (one, 1) amino acid selected from the following options: Glu Asp
  MISC_FEATURE (29)..(29): Xaa at this position is a single (one, 1) amino acid selected from the following options: Ser Pro Gln
  MISC_FEATURE (30)..(30): Xaa at this position is a single (one, 1) amino acid selected from the following options: Ala Ser Pro
  MISC_FEATURE (31)..(31): Xaa at this position is a single (one, 1) amino acid selected from the following options: Asp Glu His
  MISC_FEATURE (32)..(32): Xaa at this position is a single (one, 1) amino acid selected from the following options: Asn Asp
  MISC_FEATURE (33)..(33): Xaa at this position is a single (one, 1) amino acid selected from the following options: Leu Val
  MISC_FEATURE (34)..(34): Xaa at this position is a single (one, 1) amino acid selected from the following options: Gly Asp Arg
  MISC_FEATURE (35)..(35): Xaa at this position is a single (one, 1) amino acid selected from the following options: Ser Arg
  MISC_FEATURE (36)..(36): Xaa at this position is a single (one, 1) amino acid selected from the following options: Ser Gly Arg Thr
  MISC_FEATURE (37)..(37): Xaa at this position is a single (one, 1) amino acid selected from the following options: Ala Glu
  MISC_FEATURE (38)..(38): Xaa at this position is a single (one, 1) amino acid selected from the following options: Gly Ala
  MISC_FEATURE (40)..(40): Xaa at this position is a single (one, 1) amino acid selected from the following options: Val Ile
  MISC_FEATURE (41)..(41): Xaa at this position is a single (one, 1) amino acid selected from the following options: Arg Trp
  MISC_FEATURE (42)..(42): Xaa at this position is a single (one, 1) amino acid selected from the following options: Asp Glu Asn
  MISC_FEATURE (45)..(45): Xaa at this position is a single (one, 1) amino acid selected from the following options: Gly Val
  MISC_FEATURE (46)..(46): Xaa at this position is a single (one, 1) amino acid selected from the following options: Ala Asp
  MISC_FEATURE (48)..(48): Xaa at this position is a single (one, 1) amino acid selected from the following options: Gly Arg Ala
  MISC_FEATURE (50)..(50): Xaa at this position is a single (one, 1) amino acid selected from the following options: Arg Lys
  MISC_FEATURE (51)..(51): Xaa at this position is a single (one, 1) amino acid selected from the following options: Gly Pro Ala Val Leu Ile Met Cys Phe Tyr Trp His Lys Arg Gln Asn Glu Asp Ser Thr
  MISC_FEATURE (52)..(52): Xaa at this position is a single (one, 1) amino acid selected from the following options: Gln Ala
  MISC_FEATURE (54)..(54): Xaa at this position is a single (one, 1) amino acid selected from the following options: Glu Lys
  MISC_FEATURE (55)..(55): Xaa at this position is a single (one, 1) amino acid selected from the following options: Glu Gly
  MISC_FEATURE (56)..(56): Xaa at this position is a single (one, 1) amino acid selected from the following options: Glu Gln
  MISC_FEATURE (59)..(59): Xaa at this position is a single (one, 1) amino acid selected from the following options: Phe Leu
  MISC_FEATURE (62)..(62): Xaa at this position is a single (one, 1) amino acid selected from the following options: Arg Gln Cys
  MISC_FEATURE (63)..(63): Xaa at this position is a single (one, 1) amino acid selected from the following options: Ala Ser
  MISC_FEATURE (64)..(64): Xaa at this position is a single (one, 1) amino acid selected from the following options: Lys Arg
  MISC_FEATURE (69)..(69): Xaa at this position is a single (one, 1) amino acid selected from the following options: Ala Thr
  MISC_FEATURE (73)..(73): Xaa at this position is a single (one, 1) amino acid selected from the following options: Gly Pro Ala Val Leu Ile Met Cys Phe Tyr Trp His Lys Arg Gln Asn Glu Asp Ser Thr
  MISC_FEATURE (76)..(76): Xaa at this position is a single (one, 1) amino acid selected from the following options: Asn Glu
  MISC_FEATURE (79)..(79): Xaa at this position is a single (one, 1) amino acid selected from the following options: Ser Val Thr
  MISC_FEATURE (80)..(80): Xaa at this position is a single (one, 1) amino acid selected from the following options: Gly Pro Ala Val Leu Ile Met Cys Phe Tyr Trp His Lys Arg Gln Asn Glu Asp Ser Thr
  MISC_FEATURE (81)..(81): Xaa at this position is a single (one, 1) amino acid selected from the following options: Gly Pro Ala Val Leu Ile Met Cys Phe Tyr Trp His Lys Arg Gln Asn Glu Asp Ser Thr
  MISC_FEATURE (82)..(82): Xaa at this position is a single (one, 1) amino acid selected from the following options: Val Lys Met Glu
  MISC_FEATURE (87)..(87): Xaa at this position is a single (one, 1) amino acid selected from the following options: His Arg Cys
  MISC_FEATURE (90)..(90): Xaa at this position is a single (one, 1) amino acid selected from the following options: Lys Asn
  MISC_FEATURE (92)..(92): Xaa at this position is a single (one, 1) amino acid selected from the following options: Ile Met
  MISC_FEATURE (94)..(94): Xaa at this position is a single (one, 1) amino acid selected from the following options: Arg Glu
  MISC_FEATURE (98)..(98): Xaa at this position is a single (one, 1) amino acid selected from the following options: Ser Lys Leu
  MISC_FEATURE (99)..(99): Xaa at this position is a single (one, 1) amino acid selected from the following options: Ile Val
  MISC_FEATURE (101)..(101): Xaa at this position is a single (one, 1) amino acid selected from the following options: Lys Met
  MISC_FEATURE (104)..(104): Xaa at this position is a single (one, 1) amino acid selected from the following options: His Gln
  MISC_FEATURE (105)..(105): Xaa at this position is a single (one, 1) amino acid selected from the following options: Asp His
  MISC_FEATURE (107)..(107): Asp or is absent (no amino acid at this position and so this position is not present)
  MISC_FEATURE (108)..(108): Asp or is absent (no amino acid at this position and so this position is not present)
MAXXXLXAXXXXXXXXXXXXQXXXXXSXXXXXXXXXXXAXXXAGXXFXKXXXAXXXRYXRAXXXEQLAXLKKXKEXEIXXXXKEIEXLQXEXEXHKQXXKXLKXXDXX

SEQ ID NO: 95 - protein, 108 aa, Artificial Sequence
  Designed; as detailed elsewhere in present application
  MISC_FEATURE (16)..(16): Xaa at this position is a single (one, 1) amino acid selected from the following options: Gly Ser
  MISC_FEATURE (18)..(18): Xaa at this position is a single (one, 1) amino acid selected from the following options: Trp Arg
  MISC_FEATURE (19)..(19): Xaa at this position is a single (one, 1) amino acid selected from the following options: Ala Thr
  MISC_FEATURE (22)..(22): Xaa at this position is a single (one, 1) amino acid selected from the following options: Gly Ala
  MISC_FEATURE (23)..(23): Xaa at this position is a single (one, 1) amino acid selected from the following options: Arg Gln
  MISC_FEATURE (26)..(26): Xaa at this position is a single (one, 1) amino acid selected from the following options: Gly Ser
  MISC_FEATURE (28)..(28): Xaa at this position is a single (one, 1) amino acid selected from the following options: Glu Asp
  MISC_FEATURE (29)..(29): Xaa at this position is a single (one, 1) amino acid selected from the following options: Ser Gln
  MISC_FEATURE (30)..(30): Xaa at this position is a single (one, 1) amino acid selected from the following options: Ala Ser
  MISC_FEATURE (31)..(31): Xaa at this position is a single (one, 1) amino acid selected from the following options: Asp Glu
  MISC_FEATURE (32)..(32): Xaa at this position is a single (one, 1) amino acid selected from the following options: Asn Asp
  MISC_FEATURE (34)..(34): Xaa at this position is a single (one, 1) amino acid selected from the following options: Gly Asp
  MISC_FEATURE (35)..(35): Xaa at this position is a single (one, 1) amino acid selected from the following options: Ser Arg
  MISC_FEATURE (36)..(36): Xaa at this position is a single (one, 1) amino acid selected from the following options: Ser Gly
  MISC_FEATURE (40)..(40): Xaa at this position is a single (one, 1) amino acid selected from the following options: Val Ile
  MISC_FEATURE (41)..(41): Xaa at this position is a single (one, 1) amino acid selected from the following options: Arg Trp
  MISC_FEATURE (42)..(42): Xaa at this position is a single (one, 1) amino acid selected from the following options: Asp Glu
  MISC_FEATURE (45)..(45): Xaa at this position is a single (one, 1) amino acid selected from the following options: Gly Val
  MISC_FEATURE (46)..(46): Xaa at this position is a single (one, 1) amino acid selected from the following options: Ala Asp
  MISC_FEATURE (48)..(48): Xaa at this position is a single (one, 1) amino acid selected from the following options: Gly Ala
  MISC_FEATURE (50)..(50): Xaa at this position is a single (one, 1) amino acid selected from the following options: Arg Lys
  MISC_FEATURE (51)..(51): Xaa at this position is a single (one, 1) amino acid selected from the following options: Gly Pro Ala Val Leu Ile Met Cys Phe Tyr Trp His Lys Arg Gln Asn Glu Asp Ser Thr
  MISC_FEATURE (52)..(52): Xaa at this position is a single (one, 1) amino acid selected from the following options: Gln Ala
  MISC_FEATURE (54)..(54): Xaa at this position is a single (one, 1) amino acid selected from the following options: Glu Lys
  MISC_FEATURE (55)..(55): Xaa at this position is a single (one, 1) amino acid selected from the following options: Glu Gly
  MISC_FEATURE (56)..(56): Xaa at this position is a single (one, 1) amino acid selected from the following options: Glu Gln
  MISC_FEATURE (59)..(59): Xaa at this position is a single (one, 1) amino acid selected from the following options: Phe Leu
  MISC_FEATURE (62)..(62): Xaa at this position is a single (one, 1) amino acid selected from the following options: Arg Gln
  MISC_FEATURE (63)..(63): Xaa at this position is a single (one, 1) amino acid selected from the following options: Ala Ser
  MISC_FEATURE (64)..(64): Xaa at this position is a single (one, 1) amino acid selected from the following options: Lys Arg
  MISC_FEATURE (73)..(73): Xaa at this position is a single (one, 1) amino acid selected from the following options: Gly Pro Ala Val Leu Ile Met Cys Phe Tyr Trp His Lys Arg Gln Asn Glu Asp Ser Thr
  MISC_FEATURE (76)..(76): Xaa at this position is a single (one, 1) amino acid selected from the following options: Asn Glu
  MISC_FEATURE (79)..(79): Xaa at this position is a single (one, 1) amino acid selected from the following options: Ser Val
  MISC_FEATURE (80)..(80): Xaa at this position is a single (one, 1) amino acid selected from the following options: Gly Pro Ala Val Leu Ile Met Cys Phe Tyr Trp His Lys Arg Gln Asn Glu Asp Ser Thr
  MISC_FEATURE (81)..(81): Xaa at this position is a single (one, 1) amino acid selected from the following options: Gly Pro Ala Val Leu Ile Met Cys Phe Tyr Trp His Lys Arg Gln Asn Glu Asp Ser Thr
  MISC_FEATURE (82)..(82): Xaa at this position is a single (one, 1) amino acid selected from the following options: Val Lys
  MISC_FEATURE (87)..(87): Xaa at this position is a single (one, 1) amino acid selected from the following options: His Arg
  MISC_FEATURE (98)..(98): Xaa at this position is a single (one, 1) amino acid selected from the following options: Ser Lys
  MISC_FEATURE (101)..(101): Xaa at this position is a single (one, 1) amino acid selected from the following options: Lys Met
  MISC_FEATURE (108)..(108): Asp or is absent (no amino acid at this position and so this position is not present)
MAATALAARTRFGVWXVXXMQXXGFXSXXXXXLXXXAGAXXXAGXXFXKXXXAXXXRYXRAXXXEQLAALKKXKEXEIXXXXKEIEXLQKEIERHKQXIKXLKHDDDX

SEQ ID NO: 96 - protein, 107 aa, Artificial Sequence
  Designed; as detailed elsewhere in present application
  MISC_FEATURE (3)..(3): Xaa at this position is a single (one, 1) amino acid selected from the following options: Ala Val
  MISC_FEATURE (4)..(4): Xaa at this position is a single (one, 1) amino acid selected from the following options: Thr Val
  MISC_FEATURE (7)..(7): Xaa at this position is a single (one, 1) amino acid selected from the following options: Ala Val
  MISC_FEATURE (9)..(9): Xaa at this position is a single (one, 1) amino acid selected from the following options: Arg Trp
  MISC_FEATURE (10)..(10): Xaa at this position is a single (one, 1) amino acid selected from the following options: Thr Met
  MISC_FEATURE (11)..(11): Xaa at this position is a single (one, 1) amino acid selected from the following options: Arg Gln Trp
  MISC_FEATURE (12)..(12): Xaa at this position is a single (one, 1) amino acid selected from the following options: Phe Leu
  MISC_FEATURE (13)..(13): Xaa at this position is a single (one, 1) amino acid selected from the following options: Gly Arg
  MISC_FEATURE (16)..(16): Xaa at this position is a single (one, 1) amino acid selected from the following options: Gly Ser
  MISC_FEATURE (18)..(18): Xaa at this position is a single (one, 1) amino acid selected from the following options: Arg Trp
  MISC_FEATURE (19)..(19): Xaa at this position is a single (one, 1) amino acid selected from the following options: Thr Val Ala
  MISC_FEATURE (22)..(22): Xaa at this position is a single (one, 1) amino acid selected from the following options: Gly Ala
  MISC_FEATURE (23)..(23): Xaa at this position is a single (one, 1) amino acid selected from the following options: Arg Leu
  MISC_FEATURE (28)..(28): Xaa at this position is a single (one, 1) amino acid selected from the following options: Glu Asp
  MISC_FEATURE (29)..(29): Xaa at this position is a single (one, 1) amino acid selected from the following options: Ser Pro Gln
  MISC_FEATURE (30)..(30): Xaa at this position is a single (one, 1) amino acid selected from the following options: Ala Ser
  MISC_FEATURE (31)..(31): Xaa at this position is a single (one, 1) amino acid selected from the following options: Asp Glu
  MISC_FEATURE (33)..(33): Xaa at this position is a single (one, 1) amino acid selected from the following options: Leu Val
  MISC_FEATURE (34)..(34): Xaa at this position is a single (one, 1) amino acid selected from the following options: Gly Asp
  MISC_FEATURE (35)..(35): Xaa at this position is a single (one, 1) amino acid selected from the following options: Ser Arg
  MISC_FEATURE (36)..(36): Xaa at this position is a single (one, 1) amino acid selected from the following options: Ser Gly
  MISC_FEATURE (37)..(37): Xaa at this position is a single (one, 1) amino acid selected from the following options: Ala Glu
  MISC_FEATURE (38)..(38): Xaa at this position is a single (one, 1) amino acid selected from the following options: Gly Ala
  MISC_FEATURE (40)..(40): Xaa at this position is a single (one, 1) amino acid selected from the following options: Trp Val Ile
  MISC_FEATURE (41)..(41): Xaa at this position is a single (one, 1) amino acid selected from the following options: Arg Trp
  MISC_FEATURE (42)..(42): Xaa at this position is a single (one, 1) amino acid selected from the following options: Asn Glu Asp
  MISC_FEATURE (45)..(45): Xaa at this position is a single (one, 1) amino acid selected from the following options: Gly Val
  MISC_FEATURE (46)..(46): Xaa at this position is a single (one, 1) amino acid selected from the following options: Ala Asp
  MISC_FEATURE (48)..(48): Xaa at this position is a single (one, 1) amino acid selected from the following options: Gly Arg
  MISC_FEATURE (50)..(50): Xaa at this position is a single (one, 1) amino acid selected from the following options: Lys Arg
  MISC_FEATURE (51)..(51): Xaa at this position is a single (one, 1) amino acid selected from the following options: Gly Pro Ala Val Leu Ile Met Cys Phe Tyr Trp His Lys Arg Gln Asn Glu Asp Ser Thr
  MISC_FEATURE (54)..(54): Xaa at this position is a single (one, 1) amino acid selected from the following options: Glu Lys
  MISC_FEATURE (55)..(55): Xaa at this position is a single (one, 1) amino acid selected from the following options: Glu Gly
  MISC_FEATURE (59)..(59): Xaa at this position is a single (one, 1) amino acid selected from the following options: Phe Leu
  MISC_FEATURE (62)..(62): Xaa at this position is a single (one, 1) amino acid selected from the following options: Arg Gln
  MISC_FEATURE (63)..(63): Xaa at this position is a single (one, 1) amino acid selected from the following options: Ala Ser
  MISC_FEATURE (64)..(64): Xaa at this position is a single (one, 1) amino acid selected from the following options: Lys Arg
  MISC_FEATURE (73)..(73): Xaa at this position is a single (one, 1) amino acid selected from the following options: Gly Pro Ala Val Leu Ile Met Cys Phe Tyr Trp His Lys Arg Gln Asn Glu Asp Ser Thr
  MISC_FEATURE (76)..(76): Xaa at this position is a single (one, 1) amino acid selected from the following options: Asn Glu
  MISC_FEATURE (79)..(79): Xaa at this position is a single (one, 1) amino acid selected from the following options: Ser Val
  MISC_FEATURE (80)..(80): Xaa at this position is a single (one, 1) amino acid selected from the following options: Gly Pro Ala Val Leu Ile Met Cys Phe Tyr Trp His Lys Arg Gln Asn Glu Asp Ser Thr
  MISC_FEATURE (81)..(81): Xaa at this position is a single (one, 1) amino acid selected from the following options: Gly Pro Ala Val Leu Ile Met Cys Phe Tyr Trp His Lys Arg Gln Asn Glu Asp Ser Thr
  MISC_FEATURE (82)..(82): Xaa at this position is a single (one, 1) amino acid selected from the following options: Val Lys
  MISC_FEATURE (87)..(87): Xaa at this position is a single (one, 1) amino acid selected from the following options: Arg His
  MISC_FEATURE (98)..(98): Xaa at this position is a single (one, 1) amino acid selected from the following options: Lys Ser
  MISC_FEATURE (101)..(101): Xaa at this position is a single (one, 1) amino acid selected from the following options: Met Lys
  MISC_FEATURE (107)..(107): Asp or is absent (no amino acid at this position and so this position is not present)
MAXXALXAXXXXXVWXVXXMQXXGFGSXXXXNXXXXXXAXXXAGXXFXKXXQAXXERYXRAXXXEQLAALKKXKEXEIXXXXKEIEXLQKEIERHKQXIKXLKHDDX

SEQ ID NO: 97 - protein, 107 aa, Artificial Sequence
  Designed; as detailed elsewhere in present application
  MISC_FEATURE (51)..(51): Xaa at this position is a single (one, 1) amino acid selected from the following options: Gly Pro Ala Val Leu Ile Met Cys Phe Tyr Trp His Lys Arg Gln Asn Glu Asp Ser Thr
  MISC_FEATURE (73)..(73): Xaa at this position is a single (one, 1) amino acid selected from the following options: Gly Pro Ala Val Leu Ile Met Cys Phe Tyr Trp His Lys Arg Gln Asn Glu Asp Ser Thr
  MISC_FEATURE (80)..(80): Xaa at this position is a single (one, 1) amino acid selected from the following options: Gly Pro Ala Val Leu Ile Met Cys Phe Tyr Trp His Lys Arg Gln Asn Glu Asp Ser Thr
  MISC_FEATURE (81)..(81): Xaa at this position is a single (one, 1) amino acid selected from the following options: Gly Pro Ala Val Leu Ile Met Cys Phe Tyr Trp His Lys Arg Gln Asn Glu Asp Ser Thr
MAATALAARTRFGVWSVWAMQGRGFGSESADNLGSSAGAIRDAGGAFGKKXQAEEERYFRARAKEQLAALKKXKENEISXXVKEIEHLQKEIERHKQSIKKLKHDDD

SEQ ID NO: 98 - protein, 107 aa, Artificial Sequence
  Designed; as detailed elsewhere in present application
  MISC_FEATURE (3)..(3): Xaa at this position is a single (one, 1) amino acid selected from the following options: Val Gly Ala Thr
  MISC_FEATURE (4)..(4): Xaa at this position is a single (one, 1) amino acid selected from the following options: Thr Ser Pro
  MISC_FEATURE (5)..(5): Xaa at this position is a single (one, 1) amino acid selected from the following options: Ala Val Glu
  MISC_FEATURE (6)..(6): Xaa at this position is a single (one, 1) amino acid selected from the following options: Leu Thr Gln
  MISC_FEATURE (7)..(7): Xaa at this position is a single (one, 1) amino acid selected from the following options: Ala Val
  MISC_FEATURE (8)..(8): Xaa at this position is a single (one, 1) amino acid selected from the following options: Ala Val Leu Ile Thr
  MISC_FEATURE (9)..(9): Xaa at this position is a single (one, 1) amino acid selected from the following options: Arg Gln Trp
  MISC_FEATURE (10)..(10): Xaa at this position is a single (one, 1) amino acid selected from the following options: Thr Val Met Ala Ser Leu
  MISC_FEATURE (11)..(11): Xaa at this position is a single (one, 1) amino acid selected from the following options: Trp Arg Gln
  MISC_FEATURE (12)..(12): Xaa at this position is a single (one, 1) amino acid selected from the following options: Leu Phe Gln
  MISC_FEATURE (13)..(13): Xaa at this position is a single (one, 1) amino acid selected from the following options: Gly Tyr Cys Ala Arg
  MISC_FEATURE (14)..(14): Xaa at this position is a single (one, 1) amino acid selected from the following options: Val Ser Ala Thr Met Arg
  MISC_FEATURE (15)..(15): Xaa at this position is a single (one, 1) amino acid selected from the following options: Trp Leu
  MISC_FEATURE (16)..(16): Xaa at this position is a single (one, 1) amino acid selected from the following options: Gly Ser
  MISC_FEATURE (17)..(17): Xaa at this position is a single (one, 1) amino acid selected from the following options: Val Ala Met
  MISC_FEATURE (18)..(18): Xaa at this position is a single (one, 1) amino acid selected from the following options: Arg Trp Lys Leu
  MISC_FEATURE (19)..(19): Xaa at this position is a single (one, 1) amino acid selected from the following options: Thr Ala Val Ser
  MISC_FEATURE (20)..(20): Xaa at this position is a single (one, 1) amino acid selected from the following options: Met Leu Ile Arg Val Ala Thr
  MISC_FEATURE (21)..(21): Xaa at this position is a single (one, 1) amino acid selected from the following options: Gln Arg
  MISC_FEATURE (22)..(22): Xaa at this position is a single (one, 1) amino acid selected from the following options: Ala Thr Gly Ser
  MISC_FEATURE (23)..(23): Xaa at this position is a single (one, 1) amino acid selected from the following options: Arg Gln Gly Leu
  MISC_FEATURE (24)..(24): Xaa at this position is a single (one, 1) amino acid selected from the following options: Gly Ser
  MISC_FEATURE (25)..(25): Xaa at this position is a single (one, 1) amino acid selected from the following options: Phe Tyr
  MISC_FEATURE (51)..(51): Xaa at this position is a single (one, 1) amino acid selected from the following options: Gly Pro Ala Val Leu Ile Met Cys Phe Tyr Trp His Lys Arg Gln Asn Glu Asp Ser Thr
  MISC_FEATURE (73)..(73): Xaa at this position is a single (one, 1) amino acid selected from the following options: Gly Pro Ala Val Leu Ile Met Cys Phe Tyr Trp His Lys Arg Gln Asn Glu Asp Ser Thr
  MISC_FEATURE (80)..(80): Xaa at this position is a single (one, 1) amino acid selected from the following options: Gly Pro Ala Val Leu Ile Met Cys Phe Tyr Trp His Lys Arg Gln Asn Glu Asp Ser Thr
  MISC_FEATURE (81)..(81): Xaa at this position is a single (one, 1) amino acid selected from the following options: Gly Pro Ala Val Leu Ile Met Cys Phe Tyr Trp His Lys Arg Gln Asn Glu Asp Ser Thr
MAXXXXXXXXXXXXXXXXXXXXXXXGSESADNLGSSAGAIRDAGGAFGKKXQAEEERYFRARAKEQLAALKKXKENEISXXVKEIEHLQKEIERHKQSIKKLKHDDD

SEQ ID NO: 99 - protein, 107 aa, Artificial Sequence
  Designed; as detailed elsewhere in present application
  MISC_FEATURE (51)..(51): Xaa at this position is a single (one, 1) amino acid selected from the following options: Gly Pro Ala Val Leu Ile Met Cys Phe Tyr Trp His Lys Arg Gln Asn Glu Asp Ser Thr
  MISC_FEATURE (73)..(73): Xaa at this position is a single (one, 1) amino acid selected from the following options: Gly Pro Ala Val Leu Ile Met Cys Phe Tyr Trp His Lys Arg Gln Asn Glu Asp Ser Thr
  MISC_FEATURE (80)..(80): Xaa at this position is a single (one, 1) amino acid selected from the following options: Gly Pro Ala Val Leu Ile Met Cys Phe Tyr Trp His Lys Arg Gln Asn Glu Asp Ser Thr
  MISC_FEATURE (81)..(81): Xaa at this position is a single (one, 1) amino acid selected from the following options: Gly Pro Ala Val Leu Ile Met Cys Phe Tyr Trp His Lys Arg Gln Asn Glu Asp Ser Thr
MAVTALAARTWLGVWGVRTMQARGFGSESADNLGSSAGAIRDAGGAFGKKXQAEEERYFRARAKEQLAALKKXKENEISXXVKEIEHLQKEIERHKQSIKKLKHDDD

SEQ ID NO: 100 - protein, 107 aa, Artificial Sequence
  Designed; as detailed elsewhere in present application
  MISC_FEATURE (51)..(51): Xaa at this position is a single (one, 1) amino acid selected from the following options: Gly Pro Ala Val Leu Ile Met Cys Phe Tyr Trp His Lys Arg Gln Asn Glu Asp Ser Thr
  MISC_FEATURE (73)..(73): Xaa at this position is a single (one, 1) amino acid selected from the following options: Gly Pro Ala Val Leu Ile Met Cys Phe Tyr Trp His Lys Arg Gln Asn Glu Asp Ser Thr
  MISC_FEATURE (80)..(80): Xaa at this position is a single (one, 1) amino acid selected from the following options: Gly Pro Ala Val Leu Ile Met Cys Phe Tyr Trp His Lys Arg Gln Asn Glu Asp Ser Thr
  MISC_FEATURE (81)..(81): Xaa at this position is a single (one, 1) amino acid selected from the following options: Gly Pro Ala Val Leu Ile Met Cys Phe Tyr Trp His Lys Arg Gln Asn Glu Asp Ser Thr
MAGSALAVRARFGVWGMKVLQTRGFGSESADNLGSSAGAIRDAGGAFGKKXQAEEERYFRARAKEQLAALKKXKENEISXXVKEIEHLQKEIERHKQSIKKLKHDDD

SEQ ID NO: 101 - protein, 110 aa, Artificial Sequence
  Designed; as detailed elsewhere in present application
  MISC_FEATURE (3)..(3): Xaa at this position is a single (one, 1) amino acid selected from the following options: Val Gly Ala Thr
  MISC_FEATURE (4)..(4): Xaa at this position is a single (one, 1) amino acid selected from the following options: Thr Ser Pro
  MISC_FEATURE (5)..(5): Xaa at this position is a single (one, 1) amino acid selected from the following options: Glu Ala Val
  MISC_FEATURE (6)..(6): Xaa at this position is a single (one, 1) amino acid selected from the following options: Leu Thr Gln
  MISC_FEATURE (7)..(7): Xaa at this position is a single (one, 1) amino acid selected from the following options: Ala Val
  MISC_FEATURE (8)..(8): Xaa at this position is a single (one, 1) amino acid selected from the following options: Ala Val Leu Ile Thr
  MISC_FEATURE (9)..(9): Xaa at this position is a single (one, 1) amino acid selected from the following options: Trp Arg Gln
  MISC_FEATURE (10)..(10): Xaa at this position is a single (one, 1) amino acid selected from the following options: Thr Val Met Ala Ser Leu
  MISC_FEATURE (11)..(11): Xaa at this position is a single (one, 1) amino acid selected from the following options: Gln Trp Arg
  MISC_FEATURE (12)..(12): Xaa at this position is a single (one, 1) amino acid selected from the following options: Leu Phe Gln
  MISC_FEATURE (13)..(13): Xaa at this position is a single (one, 1) amino acid selected from the following options: Arg Gly Tyr Cys Ala
  MISC_FEATURE (14)..(14): Xaa at this position is a single (one, 1) amino acid selected from the following options: Val Ser Ala Thr Met Arg
  MISC_FEATURE (15)..(15): Xaa at this position is a single (one, 1) amino acid selected from the following options: Trp Leu
  MISC_FEATURE (16)..(16): Xaa at this position is a single (one, 1) amino acid selected from the following options: Gly Ser
  MISC_FEATURE (17)..(17): Xaa at this position is a single (one, 1) amino acid selected from the following options: Val Ala Met
  MISC_FEATURE (18)..(18): Xaa at this position is a single (one, 1) amino acid selected from the following options: Arg Trp Lys Leu
  MISC_FEATURE (19)..(19): Xaa at this position is a single (one, 1) amino acid selected from the following options: Thr Ala Val Ser
  MISC_FEATURE (20)..(20): Xaa at this position is a single (one, 1) amino acid selected from the following options: Met Leu Ile Arg Val Ala Thr
  MISC_FEATURE (21)..(21): Xaa at this position is a single (one, 1) amino acid selected from the following options: Gln Arg
  MISC_FEATURE (22)..(22): Xaa at this position is a single (one, 1) amino acid selected from the following options: Ala Thr Gly Ser
  MISC_FEATURE (23)..(23): Xaa at this position is a single (one, 1) amino acid selected from the following options: Leu Arg Gln Gly
  MISC_FEATURE (24)..(24): Xaa at this position is a single (one, 1) amino acid selected from the following options: Gly Ser
  MISC_FEATURE (25)..(25): Xaa at this position is a single (one, 1) amino acid selected from the following options: Phe Tyr
  MISC_FEATURE (26)..(26): Xaa at this position is a single (one, 1) amino acid selected from the following options: Gly Ser Val Ala Thr Leu Arg Phe Ile Lys Met Gln Asn
  MISC_FEATURE (27)..(27): Xaa at this position is a single (one, 1) amino acid selected from the following options: Ser Cys Arg Gly Phe Thr Pro
  MISC_FEATURE (28)..(28): Xaa at this position is a single (one, 1) amino acid selected from the following options: Asp Glu Gly Ser Phe Lys Thr Leu Phe Pro
  MISC_FEATURE (29)..(29): Xaa at this position is a single (one, 1) amino acid selected from the following options: Pro Gln Arg Ser Thr Lys Gly Glu Ala Phe
  MISC_FEATURE (30)..(30): Xaa at this position is a single (one, 1) amino acid selected from the following options: Ser Pro Ala Gly Arg Glu Asp Val
  MISC_FEATURE (31)..(31): Xaa at this position is a single (one, 1) amino acid selected from the following options: Glu Asp Lys His Ala Gly Asn Ser Arg Gln Asp Thr Leu Val
  MISC_FEATURE (32)..(32): Xaa at this position is a single (one, 1) amino acid selected from the following options: Asn Asp Tyr Ser Gly Arg His Lys Glu Ala Leu
  MISC_FEATURE (33)..(33): Xaa at this position is a single (one, 1) amino acid selected from the following options: Val Leu Pro His Met Ile Phe Thr Gly Gly Ser Asp Glu Phe
  MISC_FEATURE (34)..(34): Xaa at this position is a single (one, 1) amino acid selected from the following options: Asp Gly His Arg Ser Glu Pro
  MISC_FEATURE (35)..(35): Xaa at this position is a single (one, 1) amino acid selected from the following options: Arg Ser Gly Thr Pro Ala Lys Glu
  MISC_FEATURE (36)..(36): Xaa at this position is a single (one, 1) amino acid selected from the following options: Arg Thr Gly Ser Arg Pro Lys Asp Ala
  MISC_FEATURE (37)..(37): Xaa at this position is a single (one, 1) amino acid selected from the following options: Ala Glu Ser Gly Arg
  MISC_FEATURE (38)..(38): Xaa at this position is a single (one, 1) amino acid selected from the following options: Ala Gly Gln Pro
  MISC_FEATURE (40)..(40): Xaa at this position is a single (one, 1) amino acid selected from the following options: Ile Val Leu Glu Phe
  MISC_FEATURE (41)..(41): Xaa at this position is a single (one, 1) amino acid selected from the following options: Trp Arg Lys Glu Thr Tyr
  MISC_FEATURE (42)..(42): Xaa at this position is a single (one, 1) amino acid selected from the following options: Asn Glu Asp Ala Lys Ser
  MISC_FEATURE (43)..(43): Xaa at this position is a single (one, 1) amino acid selected from the following options: Ala Arg Lys Cys
  MISC_FEATURE (44)..(44): Xaa at this position is a single (one, 1) amino acid selected from the following options: Gly Tyr Glu Pro
  MISC_FEATURE (45)..(45): Xaa at this position is a single (one, 1) amino acid selected from the following options: Val Gly Phe Lys Arg
  MISC_FEATURE (46)..(46): Xaa at this position is a single (one, 1) amino acid selected from the following options: Asp Ala Ser Arg Leu
  MISC_FEATURE (47)..(47): Xaa at this position is a single (one, 1) amino acid selected from the following options: Phe Leu Ile Glu Ser
  MISC_FEATURE (48)..(48): Xaa at this position is a single (one, 1) amino acid selected from the following options: Arg Gly Ala Ile Glu Ser Pro
  MISC_FEATURE (49)..(49): Xaa at this position is a single (one, 1) amino acid selected from the following options: Lys Arg Thr Glu Gln
  MISC_FEATURE (50)..(50): Xaa at this position is a single (one, 1) amino acid selected from the following options: Arg Lys Met
  MISC_FEATURE (51)..(51): Xaa at this position is a single (one, 1) amino acid selected from the following options: Gly Pro Ala Val Leu Ile Met Cys Phe Tyr Trp His Lys Arg Gln Asn Glu Asp Ser Thr
  MISC_FEATURE (52)..(52): Xaa at this position is a single (one, 1) amino acid selected from the following options: Gln Ala Lys Arg Pro Phe Val
  MISC_FEATURE (53)..(53): Xaa at this position is a single (one, 1) amino acid selected from the following options: Ala Ser Arg
  MISC_FEATURE (54)..(54): Xaa at this position is a single (one, 1) amino acid selected from the following options: Lys Glu Asp His Ala Ile
  MISC_FEATURE (55)..(55): Xaa at this position is a single (one, 1) amino acid selected from the following options: Gly Glu Pro Arg
  MISC_FEATURE (56)..(56): Xaa at this position is a single (one, 1) amino acid selected from the following options: Glu Asp Tyr Thr Gln
  MISC_FEATURE (57)..(57): Xaa at this position is a single (one, 1) amino acid selected from the following options: Arg Met Lys
  MISC_FEATURE (58)..(58): Xaa at this position is a single (one, 1) amino acid selected from the following options: Tyr Phe Glu
  MISC_FEATURE (59)..(59): Xaa at this position is a single (one, 1) amino acid selected from the following options: Leu Phe Pro Gln
  MISC_FEATURE (60)..(60): Xaa at this position is a single (one, 1) amino acid selected from the following options: Arg Leu Lys
  MISC_FEATURE (61)..(61): Xaa at this position is a single (one, 1) amino acid selected from the following options: Ala Lys Glu Thr Asp Gln Arg
  MISC_FEATURE (62)..(62): Xaa at this position is a single (one, 1) amino acid selected from the following options: Gln Arg Lys Ala Cys
  MISC_FEATURE (63)..(63): Xaa at this position is a single (one, 1) amino acid selected from the following options: Ser Thr Ala Asn Glu Leu
  MISC_FEATURE (64)..(64): Xaa at this position is a single (one, 1) amino acid selected from the following options: Arg Lys Gln His Ala
  MISC_FEATURE (65)..(65): Xaa at this position is a single (one, 1) amino acid selected from the following options: Glu Gln Lys
  MISC_FEATURE (66)..(66): Xaa at this position is a single (one, 1) amino acid selected from the following options: Gln Lys
  MISC_FEATURE (67)..(67): Xaa at this position is a single (one, 1) amino acid selected from the following options: Leu His Met Glu
  MISC_FEATURE (68)..(68): Xaa at this position is a single (one, 1) amino acid selected from the following options: Ala Leu Glu Thr Asp Ser
  MISC_FEATURE (69)..(69): Xaa at this position is a single (one, 1) amino acid selected from the following options: Ala Thr Arg Ile Ser Asn Val Met Asp
  MISC_FEATURE (70)..(70): Xaa at this position is a single (one, 1) amino acid selected from the following options: Leu Glu
  MISC_FEATURE (71)..(71): Xaa at this position is a single (one, 1) amino acid selected from the following options: Lys Arg Ile
  MISC_FEATURE (72)..(72): Xaa at this position is a single (one, 1) amino acid selected from the following options: Lys Asn Arg Thr Glu
  MISC_FEATURE (73)..(73): Xaa at this position is a single (one, 1) amino acid selected from the following options: Gly Pro Ala Val Leu Ile Met Cys Phe Tyr Trp His Lys Arg Gln Asn Glu Asp Ser Thr
  MISC_FEATURE (75)..(75): Xaa at this position is a single (one, 1) amino acid selected from the following options: Glu Gln Lys Val
  MISC_FEATURE (76)..(76): Xaa at this position is a single (one, 1) amino acid selected from the following options: Glu Asp Asn Lys
  MISC_FEATURE (77)..(77): Xaa at this position is a single (one, 1) amino acid selected from the following options: Glu Val
  MISC_FEATURE (78)..(78): Xaa at this position is a single (one, 1) amino acid selected from the following options: Ile Val
  MISC_FEATURE (79)..(79): Xaa at this position is a single (one, 1) amino acid selected from the following options: Val Thr Ser Asp Asn Gly Ala Glu Gln Tyr Arg
  MISC_FEATURE (80)..(80): Xaa at this position is a single (one, 1) amino acid selected from the following options: Gly Pro Ala Val Leu Ile Met Cys Phe Tyr Trp His Lys Arg Gln Asn Glu Asp Ser Thr
  MISC_FEATURE (81)..(81): Xaa at this position is a single (one, 1) amino acid selected from the following options: Gly Pro Ala Val Leu Ile Met Cys Phe Tyr Trp His Lys Arg Gln Asn Glu Asp Ser Thr
  MISC_FEATURE (82)..(82): Xaa at this position is a single (one, 1) amino acid selected from the following options: Lys Ser Met Val His Ala Arg Gln Glu Ile Leu Val
  MISC_FEATURE (83)..(83): Xaa at this position is a single (one, 1) amino acid selected from the following options: Lys Glu Gln Arg Gly
  MISC_FEATURE (84)..(84): Xaa at this position is a single (one, 1) amino acid selected from the following options: Glu Ala Gln
  MISC_FEATURE (86)..(86): Xaa at this position is a single (one, 1) amino acid selected from the following options: Glu Lys Asp Gln
  MISC_FEATURE (87)..(87): Xaa at this position is a single (one, 1) amino acid selected from the following options: Arg His Leu Gln Cys Val Gln
  MISC_FEATURE (88)..(88): Xaa at this position is a single (one, 1) amino acid selected from the following options: Leu Met
  MISC_FEATURE (89)..(89): Xaa at this position is a single (one, 1) amino acid selected from the following options: Gln Glu Lys
  MISC_FEATURE (90)..(90): Xaa at this position is a single (one, 1) amino acid selected from the following options: Lys Asn Arg Gln
  MISC_FEATURE (91)..(91): Xaa at this position is a single (one, 1) amino acid selected from the following options: Glu Gln Asn
  MISC_FEATURE (92)..(92): Xaa at this position is a single (one, 1) amino acid selected from the following options: Ile Met
  MISC_FEATURE (93)..(93): Xaa at this position is a single (one, 1) amino acid selected from the following options: Glu Gln Asp Ile Lys
  MISC_FEATURE (94)..(94): Xaa at this position is a single (one, 1) amino acid selected from the following options: Arg Gln Lys Glu
  MISC_FEATURE (95)..(95): Xaa at this position is a single (one, 1) amino acid selected from the following options: His Leu Ile
  MISC_FEATURE (96)..(96): Xaa at this position is a single (one, 1) amino acid selected from the following options: Lys Gln Glu
  MISC_FEATURE (97)..(97): Xaa at this position is a single (one, 1) amino acid selected from the following options: Gln Lys Glu Tyr Gly Ser His Asp Asn
  MISC_FEATURE (98)..(98): Xaa at this position is a single (one, 1) amino acid selected from the following options: Lys Arg Ser Ala Asn Thr His Ser Leu
  MISC_FEATURE (99)..(99): Xaa at this position is a single (one, 1) amino acid selected from the following options: Ile Met Asp Val
  MISC_FEATURE (100)..(100): Xaa at this position is a single (one, 1) amino acid selected from the following options: Lys Gln Arg Asn
  MISC_FEATURE (101)..(101): Xaa at this position is a single (one, 1) amino acid selected from the following options: Met Thr Lys His Tyr Ser Gln Ile Val Asn Asp Arg
  MISC_FEATURE (103)..(103): Xaa at this position is a single (one, 1) amino acid selected from the following options: Lys Asn Ser His Arg Thr Gly
  MISC_FEATURE (104)..(104): Xaa at this position is a single (one, 1) amino acid selected from the following options: His Asp Asn Ser Arg Gln Glu Tyr Asn Leu Gln Gly
  MISC_FEATURE (105)..(105): Xaa at this position is a single (one, 1) amino acid selected from the following options: Asp His Ser Asn Ile or is absent (no amino acid at this position and so this position is not present)
  MISC_FEATURE (106)..(106): Xaa at this position is a single (one, 1) amino acid selected from the following options: Asp Glu His Gly Asn or is absent (no amino acid at this position and so this position is not present)
  MISC_FEATURE (107)..(107): Xaa at this position is a single (one, 1) amino acid selected from the following options: Asp His or is absent (no amino acid at this position and so this position is not present)
  MISC_FEATURE (108)..(108): Xaa at this position is a single (one, 1) amino acid selected from the following options: Asp Glu or is absent (no amino acid at this position and so this position is not present)
  MISC_FEATURE (109)..(109): Asp or is absent (no amino acid at this position and so this position is not present)
  MISC_FEATURE (110)..(110): Asp or is absent (no amino acid at this position and so this position is not present)
MAXXXXXXXXXXXXXXXXXXXXXXXXXXXXXXXXXXXXAXXXXXXXXXXXXXXXXXXXXXXXXXXXXXXXXXXKXXXXXXXXXXIXXXXXXXXXXXXXXXXLXXXXXXXX

SEQ ID NO: 102 - protein, 108 aa, Artificial Sequence
  Designed; as detailed elsewhere in present application
  MISC_FEATURE (3)..(3): Xaa at this position is a single (one, 1) amino acid selected from the following options: Val Gly Ala Thr
  MISC_FEATURE (4)..(4): Xaa at this position is a single (one, 1) amino acid selected from the following options: Thr Ser Pro
  MISC_FEATURE (5)..(5): Xaa at this position is a single (one, 1) amino acid selected from the following options: Ala Val Glu
  MISC_FEATURE (6)..(6): Xaa at this position is a single (one, 1) amino acid selected from the following options: Leu Thr Gln
  MISC_FEATURE (7)..(7): Xaa at this position is a single (one, 1) amino acid selected from the following options: Ala Val
  MISC_FEATURE (8)..(8): Xaa at this position is a single (one, 1) amino acid selected from the following options: Ala Val Leu Ile Thr
  MISC_FEATURE (9)..(9): Xaa at this position is a single (one, 1) amino acid selected from the following options: Arg Gln Trp
  MISC_FEATURE (10)..(10): Xaa at this position is a single (one, 1) amino acid selected from the following options: Thr Val Met Ala Ser Leu
  MISC_FEATURE (11)..(11): Xaa at this position is a single (one, 1) amino acid selected from the following options: Trp Arg Gln
  MISC_FEATURE (12)..(12): Xaa at this position is a single (one, 1) amino acid selected from the following options: Leu Phe Gln
  MISC_FEATURE (13)..(13): Xaa at this position is a single (one, 1) amino acid selected from the following options: Gly Tyr Cys Ala Arg
  MISC_FEATURE (14)..(14): Xaa at this position is a single (one, 1) amino acid selected from the following options: Val Ser Ala Thr Met Arg
  MISC_FEATURE (15)..(15): Xaa at this position is a single (one, 1) amino acid selected from the following options: Trp Leu
  MISC_FEATURE (16)..(16): Xaa at this position is a single (one, 1) amino acid selected from the following options: Gly Ser
  MISC_FEATURE (17)..(17): Xaa at this position is a single (one, 1) amino acid selected from the following options: Val Ala Met
  MISC_FEATURE (18)..(18): Xaa at this position is a single (one, 1) amino acid selected from the following options: Arg Trp Lys Leu
  MISC_FEATURE (19)..(19): Xaa at this position is a single (one, 1) amino acid selected from the following options: Thr Ala Val Ser
  MISC_FEATURE (20)..(20): Xaa at this position is a single (one, 1) amino acid selected from the following options: Met Leu Ile Arg Val Ala Thr
  MISC_FEATURE (21)..(21): Xaa at this position is a single (one, 1) amino acid selected from the following options: Gln Arg
  MISC_FEATURE (22)..(22): Xaa at this position is a single (one, 1) amino acid selected from the following options: Ala Thr Gly Ser
  MISC_FEATURE (23)..(23): Xaa at this position is a single (one, 1) amino acid selected from the following options: Arg Gln Gly Leu
  MISC_FEATURE (24)..(24): Xaa at this position is a single (one, 1) amino acid selected from the following options: Gly Ser
  MISC_FEATURE (25)..(25): Xaa at this position is a single (one, 1) amino acid selected from the following options: Phe Tyr
  MISC_FEATURE (26)..(26): Xaa at this position is a single (one, 1) amino acid selected from the following options: Gly Leu
  MISC_FEATURE (27)..(27): Xaa at this position is a single (one, 1) amino acid selected from the following options: Ser Gly
  MISC_FEATURE (28)..(28): Xaa at this position is a single (one, 1) amino acid selected from the following options: Glu Asp Ser
  MISC_FEATURE (29)..(29): Xaa at this position is a single (one, 1) amino acid selected from the following options: Gly Ser Gln Pro
  MISC_FEATURE (30)..(30): Xaa at this position is a single (one, 1) amino acid selected from the following options: Ala Ser
  MISC_FEATURE (31)..(31): Xaa at this position is a single (one, 1) amino acid selected from the following options: Asp Gly Glu
  MISC_FEATURE (32)..(32): Xaa at this position is a single (one, 1) amino acid selected from the following options: Asn Lys
  MISC_FEATURE (33)..(33): Xaa at this position is a single (one, 1) amino acid selected from the following options: Leu Gly Val
  MISC_FEATURE (34)..(34): Xaa at this position is a single (one, 1) amino acid selected from the following options: Gly Asp
  MISC_FEATURE (35)..(35): Xaa at this position is a single (one, 1) amino acid selected from the following options: Ser Gly Arg
  MISC_FEATURE (36)..(36): Xaa at this position is a single (one, 1) amino acid selected from the following options: Ser Gly
  MISC_FEATURE (37)..(37): Xaa at this position is a single (one, 1) amino acid selected from the following options: Ala Gly Glu
  MISC_FEATURE (38)..(38): Xaa at this position is a single (one, 1) amino acid selected from the following options: Gly Ala
  MISC_FEATURE (40)..(40): Xaa at this position is a single (one, 1) amino acid selected from the following options: Ile Val
  MISC_FEATURE (41)..(41): Xaa at this position is a single (one, 1) amino acid selected from the following options: Arg Trp
  MISC_FEATURE (42)..(42): Xaa at this position is a single (one, 1) amino acid selected from the following options: Asp Glu Asn
  MISC_FEATURE (45)..(45): Xaa at this position is a single (one, 1) amino acid selected from the following options: Gly Val
  MISC_FEATURE (46)..(46): Xaa at this position is a single (one, 1) amino acid selected from the following options: Ala Asp
  MISC_FEATURE (48)..(48): Xaa at this position is a single (one, 1) amino acid selected from the following options: Gly Arg
  MISC_FEATURE (50)..(50): Xaa at this position is a single (one, 1) amino acid selected from the following options: Lys Arg
  MISC_FEATURE (51)..(51): Xaa at this position is a single (one, 1) amino acid selected from the following options: Gly Pro Ala Val Leu Ile Met Cys Phe Tyr Trp His Lys Arg Gln Asn Glu Asp Ser Thr
  MISC_FEATURE (52)..(52): Xaa at this position is a single (one, 1) amino acid selected from the following options: Gln Ala
  MISC_FEATURE (54)..(54): Xaa at this position is a single (one, 1) amino acid selected from the following options: Glu His Lys
  MISC_FEATURE (55)..(55): Xaa at this position is a single (one, 1) amino acid selected from the following options: Glu Gly
  MISC_FEATURE (59)..(59): Xaa at this position is a single (one, 1) amino acid selected from the following options: Phe Leu
  MISC_FEATURE (61)..(61): Xaa at this position is a single (one, 1) amino acid selected from the following options: Ala Glu Asp
  MISC_FEATURE (62)..(62): Xaa at this position is a single (one, 1) amino acid selected from the following options: Arg Lys Gln
  MISC_FEATURE (63)..(63): Xaa at this position is a single (one, 1) amino acid selected from the following options: Ala Glu Ser
  MISC_FEATURE (64)..(64): Xaa at this position is a single (one, 1) amino acid selected from the following options: Lys Arg
  MISC_FEATURE (69)..(69): Xaa at this position is a single (one, 1) amino acid selected from the following options: Ala Ser
  MISC_FEATURE (71)..(71): Xaa at this position is a single (one, 1) amino acid selected from the following options: Lys Arg
  MISC_FEATURE (72)..(72): Xaa at this position is a single (one, 1) amino acid selected from the following options: Lys Glu
  MISC_FEATURE (73)..(73): Xaa at this position is a single (one, 1) amino acid selected from the following options: Gly Pro Ala Val Leu Ile Met Cys Phe Tyr Trp His Lys Arg Gln Asn Glu Asp Ser Thr
  MISC_FEATURE (76)..(76): Xaa at this position is a single (one, 1) amino acid selected from the following options: Glu Asn
  MISC_FEATURE (79)..(79): Xaa at this position is a single (one, 1) amino acid selected from the following options: Ser Asp Val
  MISC_FEATURE (80)..(80): Xaa at this position is a single (one, 1) amino acid selected from the following options: Gly Pro Ala Val Leu Ile Met Cys Phe Tyr Trp His Lys Arg Gln Asn Glu Asp Ser Thr
  MISC_FEATURE (81)..(81): Xaa at this position is a single (one, 1) amino acid selected from the following options: Gly Pro Ala Val Leu Ile Met Cys Phe Tyr Trp His Lys Arg Gln Asn Glu Asp Ser Thr
  MISC_FEATURE (82)..(82): Xaa at this position is a single (one, 1) amino acid selected from the following options: Lys Val
  MISC_FEATURE (86)..(86): Xaa at this position is a single (one, 1) amino acid selected from the following options: Glu Gln
  MISC_FEATURE (87)..(87): Xaa at this position is a single (one, 1) amino acid selected from the following options: His Arg
  MISC_FEATURE (93)..(93): Xaa at this position is a single (one, 1) amino acid selected from the following options: Glu Asp
  MISC_FEATURE (97)..(97): Xaa at this position is a single (one, 1) amino acid selected from the following options: Gln Asn
  MISC_FEATURE (98)..(98): Xaa at this position is a single (one, 1) amino acid selected from the following options: Ser Lys
  MISC_FEATURE (101)..(101): Xaa at this position is a single (one, 1) amino acid selected from the following options: Lys Met
  MISC_FEATURE (104)..(104): Xaa at this position is a single (one, 1) amino acid selected from the following options: His Gly
  MISC_FEATURE (107)..(107): Asp or is absent (no amino acid at this position and so this position is not present)
  MISC_FEATURE (108)..(108): Asp or is absent (no amino acid at this position and so this position is not present)
MAXXXXXXXXXXXXXXXXXXXXXXXXXXXXXXXXXXXXAXXXAGXXFXKXXXAXXERYXRXXXXEQLAXLXXXKEXEIXXXXKEIXXLQKEIXRHKXXIKXLKXDDXX

SEQ ID NO: 103 - protein, 108 aa, Artificial Sequence
  Designed; as detailed elsewhere in present application
  MISC_FEATURE (3)..(3): Xaa at this position is a single (one, 1) amino acid selected from the following options: Val Gly Ala Thr
  MISC_FEATURE (4)..(4): Xaa at this position is a single (one, 1) amino acid selected from the following options: Thr Ser Pro
  MISC_FEATURE (5)..(5): Xaa at this position is a single (one, 1) amino acid selected from the following options: Ala Val Glu
  MISC_FEATURE (6)..(6): Xaa at this position is a single (one, 1) amino acid selected from the following options: Leu Thr Gln
  MISC_FEATURE (7)..(7): Xaa at this position is a single (one, 1) amino acid selected from the following options: Ala Val
  MISC_FEATURE (8)..(8): Xaa at this position is a single (one, 1) amino acid selected from the following options: Ala Val Leu Ile Thr
  MISC_FEATURE (9)..(9): Xaa at this position is a single (one, 1) amino acid selected from the following options: Arg Gln Trp
  MISC_FEATURE (10)..(10): Xaa at this position is a single (one, 1) amino acid selected from the following options: Thr Val Met Ala Ser Leu
  MISC_FEATURE (11)..(11): Xaa at this position is a single (one, 1) amino acid selected from the following options: Trp Arg Gln
  MISC_FEATURE (12)..(12): Xaa at this position is a single (one, 1) amino acid selected from the following options: Leu Phe Gln
  MISC_FEATURE (13)..(13): Xaa at this position is a single (one, 1) amino acid selected from the following options: Gly Tyr Cys Ala Arg
  MISC_FEATURE (14)..(14): Xaa at this position is a single (one, 1) amino acid selected from the following options: Val Ser Ala Thr Met Arg
  MISC_FEATURE (15)..(15): Xaa at this position is a single (one, 1) amino acid selected from the following options: Trp Leu
  MISC_FEATURE (16)..(16): Xaa at this position is a single (one, 1) amino acid selected from the following options: Gly Ser
  MISC_FEATURE (17)..(17): Xaa at this position is a single (one, 1) amino acid selected from the following options: Val Ala Met
  MISC_FEATURE (18)..(18): Xaa at this position is a single (one, 1) amino acid selected from the following options: Arg Trp Lys Leu
  MISC_FEATURE (19)..(19): Xaa at this position is a single (one, 1) amino acid selected from the following options: Thr Ala Val Ser
  MISC_FEATURE (20)..(20): Xaa at this position is a single (one, 1) amino acid selected from the following options: Met Leu Ile Arg Val Ala Thr
  MISC_FEATURE (21)..(21): Xaa at this position is a single (one, 1) amino acid selected from the following options: Gln Arg
  MISC_FEATURE (22)..(22): Xaa at this position is a single (one, 1) amino acid selected from the following options: Ala Thr Gly Ser
  MISC_FEATURE (23)..(23): Xaa at this position is a single (one, 1) amino acid selected from the following options: Arg Gln Gly Leu
  MISC_FEATURE (24)..(24): Xaa at this position is a single (one, 1) amino acid selected from the following options: Gly Ser
  MISC_FEATURE (25)..(25): Xaa at this position is a single (one, 1) amino acid selected from the following options: Phe Tyr
  MISC_FEATURE (26)..(26): Xaa at this position is a single (one, 1) amino acid selected from the following options: Gly Leu
  MISC_FEATURE (27)..(27): Xaa at this position is a single (one, 1) amino acid selected from the following options: Ser Gly
  MISC_FEATURE (28)..(28): Xaa at this position is a single (one, 1) amino acid selected from the following options: Glu Asp
  MISC_FEATURE (29)..(29): Xaa at this position is a single (one, 1) amino acid selected from the following options: Gly Ser
  MISC_FEATURE (30)..(30): Xaa at this position is a single (one, 1) amino acid selected from the following options: Ala Ser
  MISC_FEATURE (31)..(31): Xaa at this position is a single (one, 1) amino acid selected from the following options: Asp Gly
  MISC_FEATURE (32)..(32): Xaa at this position is a single (one, 1) amino acid selected from the following options: Asn Lys
  MISC_FEATURE (33)..(33): Xaa at this position is a single (one, 1) amino acid selected from the following options: Leu Gly
  MISC_FEATURE (34)..(34): Xaa at this position is a single (one, 1) amino acid selected from the following options: Gly Asp
  MISC_FEATURE (35)..(35): Xaa at this position is a single (one, 1) amino acid selected from the following options: Ser Gly
  MISC_FEATURE (36)..(36): Xaa at this position is a single (one, 1) amino acid selected from the following options: Ser Gly
  MISC_FEATURE (37)..(37): Xaa at this position is a single (one, 1) amino acid selected from the following options: Ala Gly
  MISC_FEATURE (38)..(38): Xaa at this position is a single (one, 1) amino acid selected from the following options: Gly Ala
  MISC_FEATURE (40)..(40): Xaa at this position is a single (one, 1) amino acid selected from the following options: Ile Val
  MISC_FEATURE (41)..(41): Xaa at this position is a single (one, 1) amino acid selected from the following options: Arg Trp
  MISC_FEATURE (42)..(42): Xaa at this position is a single (one, 1) amino acid selected from the following options: Asp Glu
  MISC_FEATURE (50)..(50): Xaa at this position is a single (one, 1) amino acid selected from the following options: Lys Arg
  MISC_FEATURE (51)..(51): Xaa at this position is a single (one, 1) amino acid selected from the following options: Gly Pro Ala Val Leu Ile Met Cys Phe Tyr Trp His Lys Arg Gln Asn Glu Asp Ser Thr
  MISC_FEATURE (52)..(52): Xaa at this position is a single (one, 1) amino acid selected from the following options: Gln Ala
  MISC_FEATURE (54)..(54): Xaa at this position is a single (one, 1) amino acid selected from the following options: Glu His
  MISC_FEATURE (59)..(59): Xaa at this position is a single (one, 1) amino acid selected from the following options: Phe Leu
  MISC_FEATURE (61)..(61): Xaa at this position is a single (one, 1) amino acid selected from the following options: Ala Glu
  MISC_FEATURE (62)..(62): Xaa at this position is a single (one, 1) amino acid selected from the following options: Arg Lys
  MISC_FEATURE (63)..(63): Xaa at this position is a single (one, 1) amino acid selected from the following options: Ala Glu
  MISC_FEATURE (64)..(64): Xaa at this position is a single (one, 1) amino acid selected from the following options: Lys Arg
  MISC_FEATURE (69)..(69): Xaa at this position is a single (one, 1) amino acid selected from the following options: Ala Ser
  MISC_FEATURE (71)..(71): Xaa at this position is a single (one, 1) amino acid selected from the following options: Lys Arg
  MISC_FEATURE (72)..(72): Xaa at this position is a single (one, 1) amino acid selected from the following options: Lys Glu
  MISC_FEATURE (73)..(73): Xaa at this position is a single (one, 1) amino acid selected from the following options: Gly Pro Ala Val Leu Ile Met Cys Phe Tyr Trp His Lys Arg Gln Asn Glu Asp Ser Thr
  MISC_FEATURE (76)..(76): Xaa at this position is a single (one, 1) amino acid selected from the following options: Glu Asn
  MISC_FEATURE (79)..(79): Xaa at this position is a single (one, 1) amino acid selected from the following options: Ser Asp
  MISC_FEATURE (80)..(80): Xaa at this position is a single (one, 1) amino acid selected from the following options: Gly Pro Ala Val Leu Ile Met Cys Phe Tyr Trp His Lys Arg Gln Asn Glu Asp Ser Thr
  MISC_FEATURE (81)..(81): Xaa at this position is a single (one, 1) amino acid selected from the following options: Gly Pro Ala Val Leu Ile Met Cys Phe Tyr Trp His Lys Arg Gln Asn Glu Asp Ser Thr
  MISC_FEATURE (82)..(82): Xaa at this position is a single (one, 1) amino acid selected from the following options: Lys Val
  MISC_FEATURE (86)..(86): Xaa at this position is a single (one, 1) amino acid selected from the following options: Glu Gln
  MISC_FEATURE (87)..(87): Xaa at this position is a single (one, 1) amino acid selected from the following options: His Arg
  MISC_FEATURE (93)..(93): Xaa at this position is a single (one, 1) amino acid selected from the following options: Glu Asp
  MISC_FEATURE (97)..(97): Xaa at this position is a single (one, 1) amino acid selected from the following options: Gln Asn
  MISC_FEATURE (98)..(98): Xaa at this position is a single (one, 1) amino acid selected from the following options: Ser Lys
  MISC_FEATURE (104)..(104): Xaa at this position is a single (one, 1) amino acid selected from the following options: His Gly
  MISC_FEATURE (108)..(108): Asp or is absent (no amino acid at this position and so this position is not present)
MAXXXXXXXXXXXXXXXXXXXXXXXXXXXXXXXXXXXXAXXXAGGAFGKXXXAXEERYXRXXXXEQLAXLXXXKEXEIXXXXKEIXXLQKEIXRHKXXIKKLKXDDDX

SEQ ID NO: 104 - protein, 108 aa, Artificial Sequence
  Designed; as detailed elsewhere in present application
  MISC_FEATURE (26)..(26): Xaa at this position is a single (one, 1) amino acid selected from the following options: Gly Leu
  MISC_FEATURE (27)..(27): Xaa at this position is a single (one, 1) amino acid selected from the following options: Ser Gly
  MISC_FEATURE (28)..(28): Xaa at this position is a single (one, 1) amino acid selected from the following options: Glu Asp
  MISC_FEATURE (29)..(29): Xaa at this position is a single (one, 1) amino acid selected from the following options: Gly Ser
  MISC_FEATURE (30)..(30): Xaa at this position is a single (one, 1) amino acid selected from the following options: Ala Ser
  MISC_FEATURE (31)..(31): Xaa at this position is a single (one, 1) amino acid selected from the following options: Asp Gly
  MISC_FEATURE (32)..(32): Xaa at this position is a single (one, 1) amino acid selected from the following options: Asn Lys
  MISC_FEATURE (33)..(33): Xaa at this position is a single (one, 1) amino acid selected from the following options: Leu Gly
  MISC_FEATURE (34)..(34): Xaa at this position is a single (one, 1) amino acid selected from the following options: Gly Asp
  MISC_FEATURE (35)..(35): Xaa at this position is a single (one, 1) amino acid selected from the following options: Ser Gly
  MISC_FEATURE (36)..(36): Xaa at this position is a single (one, 1) amino acid selected from the following options: Ser Gly
  MISC_FEATURE (37)..(37): Xaa at this position is a single (one, 1) amino acid selected from the following options: Ala Gly
  MISC_FEATURE (38)..(38): Xaa at this position is a single (one, 1) amino acid selected from the following options: Gly Ala
  MISC_FEATURE (40)..(40): Xaa at this position is a single (one, 1) amino acid selected from the following options: Ile Val
  MISC_FEATURE (41)..(41): Xaa at this position is a single (one, 1) amino acid selected from the following options: Arg Trp
  MISC_FEATURE (42)..(42): Xaa at this position is a single (one, 1) amino acid selected from the following options: Asp Glu
  MISC_FEATURE (50)..(50): Xaa at this position is a single (one, 1) amino acid selected from the following options: Lys Arg
  MISC_FEATURE (51)..(51): Xaa at this position is a single (one, 1) amino acid selected from the following options: Gly Pro Ala Val Leu Ile Met Cys Phe Tyr Trp His Lys Arg Gln Asn Glu Asp Ser Thr
  MISC_FEATURE (52)..(52): Xaa at this position is a single (one, 1) amino acid selected from the following options: Gln Ala
  MISC_FEATURE (54)..(54): Xaa at this position is a single (one, 1) amino acid selected from the following options: Glu His
  MISC_FEATURE (59)..(59): Xaa at this position is a single (one, 1) amino acid selected from the following options: Phe Leu
  MISC_FEATURE (61)..(61): Xaa at this position is a single (one, 1) amino acid selected from the following options: Ala Glu
  MISC_FEATURE (62)..(62): Xaa at this position is a single (one, 1) amino acid selected from the following options: Arg Lys
  MISC_FEATURE (63)..(63): Xaa at this position is a single (one, 1) amino acid selected from the following options: Ala Glu
  MISC_FEATURE (64)..(64): Xaa at this position is a single (one, 1) amino acid selected from the following options: Lys Arg
  MISC_FEATURE (69)..(69): Xaa at this position is a single (one, 1) amino acid selected from the following options: Ala Ser
  MISC_FEATURE (71)..(71): Xaa at this position is a single (one, 1) amino acid selected from the following options: Lys Arg
  MISC_FEATURE (72)..(72): Xaa at this position is a single (one, 1) amino acid selected from the following options: Lys Glu
  MISC_FEATURE (73)..(73): Xaa at this position is a single (one, 1) amino acid selected from the following options: Gly Pro Ala Val Leu Ile Met Cys Phe Tyr Trp His Lys Arg Gln Asn Glu Asp Ser Thr
  MISC_FEATURE (76)..(76): Xaa at this position is a single (one, 1) amino acid selected from the following options: Glu Asn
  MISC_FEATURE (79)..(79): Xaa at this position is a single (one, 1) amino acid selected from the following options: Ser Asp
  MISC_FEATURE (80)..(80): Xaa at this position is a single (one, 1) amino acid selected from the following options: Gly Pro Ala Val Leu Ile Met Cys Phe Tyr Trp His Lys Arg Gln Asn Glu Asp Ser Thr
  MISC_FEATURE (81)..(81): Xaa at this position is a single (one, 1) amino acid selected from the following options: Gly Pro Ala Val Leu Ile Met Cys Phe Tyr Trp His Lys Arg Gln Asn Glu Asp Ser Thr
  MISC_FEATURE (82)..(82): Xaa at this position is a single (one, 1) amino acid selected from the following options: Lys Val
  MISC_FEATURE (86)..(86): Xaa at this position is a single (one, 1) amino acid selected from the following options: Glu Gln
  MISC_FEATURE (87)..(87): Xaa at this position is a single (one, 1) amino acid selected from the following options: His Arg
  MISC_FEATURE (93)..(93): Xaa at this position is a single (one, 1) amino acid selected from the following options: Glu Asp
  MISC_FEATURE (97)..(97): Xaa at this position is a single (one, 1) amino acid selected from the following options: Gln Asn
  MISC_FEATURE (98)..(98): Xaa at this position is a single (one, 1) amino acid selected from the following options: Ser Lys
  MISC_FEATURE (104)..(104): Xaa at this position is a single (one, 1) amino acid selected from the following options: His Gly
  MISC_FEATURE (108)..(108): Asp or is absent (no amino acid at this position and so this position is not present)
MAVTALAARTWLGVWGVRTMQARGFXXXXXXXXXXXXXAXXXAGGAFGKXXXAXEERYXRXXXXEQLAXLXXXKEXEIXXXXKEIXXLQKEIXRHKXXIKKLKXDDDX

SEQ ID NO: 105 - protein, 108 aa, Artificial Sequence
  Designed; as detailed elsewhere in present application
  MISC_FEATURE (26)..(26): Xaa at this position is a single (one, 1) amino acid selected from the following options: Gly Leu
  MISC_FEATURE (27)..(27): Xaa at this position is a single (one, 1) amino acid selected from the following options: Ser Gly
  MISC_FEATURE (28)..(28): Xaa at this position is a single (one, 1) amino acid selected from the following options: Glu Asp
  MISC_FEATURE (29)..(29): Xaa at this position is a single (one, 1) amino acid selected from the following options: Gly Ser
  MISC_FEATURE (30)..(30): Xaa at this position is a single (one, 1) amino acid selected from the following options: Ala Ser
  MISC_FEATURE (31)..(31): Xaa at this position is a single (one, 1) amino acid selected from the following options: Asp Gly
  MISC_FEATURE (32)..(32): Xaa at this position is a single (one, 1) amino acid selected from the following options: Asn Lys
  MISC_FEATURE (33)..(33): Xaa at this position is a single (one, 1) amino acid selected from the following options: Leu Gly
  MISC_FEATURE (34)..(34): Xaa at this position is a single (one, 1) amino acid selected from the following options: Gly Asp
  MISC_FEATURE (35)..(35): Xaa at this position is a single (one, 1) amino acid selected from the following options: Ser Gly
  MISC_FEATURE (36)..(36): Xaa at this position is a single (one, 1) amino acid selected from the following options: Ser Gly
  MISC_FEATURE (37)..(37): Xaa at this position is a single (one, 1) amino acid selected from the following options: Ala Gly
  MISC_FEATURE (38)..(38): Xaa at this position is a single (one, 1) amino acid selected from the following options: Gly Ala
  MISC_FEATURE (40)..(40): Xaa at this position is a single (one, 1) amino acid selected from the following options: Ile Val
  MISC_FEATURE (41)..(41): Xaa at this position is a single (one, 1) amino acid selected from the following options: Arg Trp
  MISC_FEATURE (42)..(42): Xaa at this position is a single (one, 1) amino acid selected from the following options: Asp Glu
  MISC_FEATURE (50)..(50): Xaa at this position is a single (one, 1) amino acid selected from the following options: Lys Arg
  MISC_FEATURE (51)..(51): Xaa at this position is a single (one, 1) amino acid selected from the following options: Gly Pro Ala Val Leu Ile Met Cys Phe Tyr Trp His Lys Arg Gln Asn Glu Asp Ser Thr
  MISC_FEATURE (52)..(52): Xaa at this position is a single (one, 1) amino acid selected from the following options: Gln Ala
  MISC_FEATURE (54)..(54): Xaa at this position is a single (one, 1) amino acid selected from the following options: Glu His
  MISC_FEATURE (59)..(59): Xaa at this position is a single (one, 1) amino acid selected from the following options: Phe Leu
  MISC_FEATURE (61)..(61): Xaa at this position is a single (one, 1) amino acid selected from the following options: Ala Glu
  MISC_FEATURE (62)..(62): Xaa at this position is a single (one, 1) amino acid selected from the following options: Arg Lys
  MISC_FEATURE (63)..(63): Xaa at this position is a single (one, 1) amino acid selected from the following options: Ala Glu
  MISC_FEATURE (64)..(64): Xaa at this position is a single (one, 1) amino acid selected from the following options: Lys Arg
  MISC_FEATURE (69)..(69): Xaa at this position is a single (one, 1) amino acid selected from the following options: Ala Ser
  MISC_FEATURE (71)..(71): Xaa at this position is a single (one, 1) amino acid selected from the following options: Lys Arg
  MISC_FEATURE (72)..(72): Xaa at this position is a single (one, 1) amino acid selected from the following options: Lys Glu
  MISC_FEATURE (73)..(73): Xaa at this position is a single (one, 1) amino acid selected from the following options: Gly Pro Ala Val Leu Ile Met Cys Phe Tyr Trp His Lys Arg Gln Asn Glu Asp Ser Thr
  MISC_FEATURE (76)..(76): Xaa at this position is a single (one, 1) amino acid selected from the following options: Glu Asn
  MISC_FEATURE (79)..(79): Xaa at this position is a single (one, 1) amino acid selected from the following options: Ser Asp
  MISC_FEATURE (80)..(80): Xaa at this position is a single (one, 1) amino acid selected from the following options: Gly Pro Ala Val Leu Ile Met Cys Phe Tyr Trp His Lys Arg Gln Asn Glu Asp Ser Thr
  MISC_FEATURE (81)..(81): Xaa at this position is a single (one, 1) amino acid selected from the following options: Gly Pro Ala Val Leu Ile Met Cys Phe Tyr Trp His Lys Arg Gln Asn Glu Asp Ser Thr
  MISC_FEATURE (82)..(82): Xaa at this position is a single (one, 1) amino acid selected from the following options: Lys Val
  MISC_FEATURE (86)..(86): Xaa at this position is a single (one, 1) amino acid selected from the following options: Glu Gln
  MISC_FEATURE (87)..(87): Xaa at this position is a single (one, 1) amino acid selected from the following options: His Arg
  MISC_FEATURE (93)..(93): Xaa at this position is a single (one, 1) amino acid selected from the following options: Glu Asp
  MISC_FEATURE (97)..(97): Xaa at this position is a single (one, 1) amino acid selected from the following options: Gln Asn
  MISC_FEATURE (98)..(98): Xaa at this position is a single (one, 1) amino acid selected from the following options: Ser Lys
  MISC_FEATURE (104)..(104): Xaa at this position is a single (one, 1) amino acid selected from the following options: His Gly
  MISC_FEATURE (108)..(108): Asp or is absent (no amino acid at this position and so this position is not present)
MAGSALAVRARFGVWGMKVLQTRGFXXXXXXXXXXXXXAXXXAGGAFGKXXXAXEERYXRXXXXEQLAXLXXXKEXEIXXXXKEIXXLQKEIXRHKXXIKKLKXDDDX

SEQ ID NO: 106 - protein, 115 aa, Artificial Sequence
  Designed; as detailed elsewhere in present application
  MISC_FEATURE (3)..(3): Xaa at this position is a single (one, 1) amino acid selected from the following options: Val Gly Ala Thr
  MISC_FEATURE (4)..(4): Xaa at this position is a single (one, 1) amino acid selected from the following options: Thr Ser Pro
  MISC_FEATURE (5)..(5): Xaa at this position is a single (one, 1) amino acid selected from the following options: Glu Ala Val
  MISC_FEATURE (6)..(6): Xaa at this position is a single (one, 1) amino acid selected from the following options: Leu Thr Gln
  MISC_FEATURE (7)..(7): Xaa at this position is a single (one, 1) amino acid selected from the following options: Ala Val
  MISC_FEATURE (8)..(8): Xaa at this position is a single (one, 1) amino acid selected from the following options: Ala Val Leu Ile Thr
  MISC_FEATURE (9)..(9): Xaa at this position is a single (one, 1) amino acid selected from the following options: Trp Arg Gln
  MISC_FEATURE (10)..(10): Xaa at this position is a single (one, 1) amino acid selected from the following options: Thr Val Met Ala Ser Leu
  MISC_FEATURE (11)..(11): Xaa at this position is a single (one, 1) amino acid selected from the following options: Gln Trp Arg
  MISC_FEATURE (12)..(12): Xaa at this position is a single (one, 1) amino acid selected from the following options: Leu Phe Gln
  MISC_FEATURE (13)..(13): Xaa at this position is a single (one, 1) amino acid selected from the following options: Arg Gly Tyr Cys Ala
  MISC_FEATURE (14)..(14): Xaa at this position is a single (one, 1) amino acid selected from the following options: Val Ser Ala Thr Met Arg
  MISC_FEATURE (15)..(15): Xaa at this position is a single (one, 1) amino acid selected from the following options: Trp Leu
  MISC_FEATURE (16)..(16): Xaa at this position is a single (one, 1) amino acid selected from the following options: Gly Ser
  MISC_FEATURE (17)..(17): Xaa at this position is a single (one, 1) amino acid selected from the following options: Val Ala Met
  MISC_FEATURE (18)..(18): Xaa at this position is a single (one, 1) amino acid selected from the following options: Arg Trp Lys Leu
  MISC_FEATURE (19)..(19): Xaa at this position is a single (one, 1) amino acid selected from the following options: Thr Ala Val Ser
  MISC_FEATURE (20)..(20): Xaa at this position is a single (one, 1) amino acid selected from the following options: Met Leu Ile Arg Val Ala Thr
  MISC_FEATURE (21)..(21): Xaa at this position is a single (one, 1) amino acid selected from the following options: Gln Arg
  MISC_FEATURE (22)..(22): Xaa at this position is a single (one, 1) amino acid selected from the following options: Ala Thr Gly Ser
  MISC_FEATURE (23)..(23): Xaa at this position is a single (one, 1) amino acid selected from the following options: Leu Arg Gln Gly
  MISC_FEATURE (24)..(24): Xaa at this position is a single (one, 1) amino acid selected from the following options: Gly Ser
  MISC_FEATURE (25)..(25): Xaa at this position is a single (one, 1) amino acid selected from the following options: Phe Tyr
  MISC_FEATURE (26)..(26): Xaa at this position is a single (one, 1) amino acid selected from the following options: Gly Ser Val Ala Thr Leu Arg Phe Ile Lys Met Gln Asn
  MISC_FEATURE (27)..(27): Xaa at this position is a single (one, 1) amino acid selected from the following options: Ser Cys Arg Gly Phe Thr Pro
  MISC_FEATURE (28)..(28): Xaa at this position is a single (one, 1) amino acid selected from the following options: Asp Glu Gly Ser Phe Lys Thr Leu Phe Pro
  MISC_FEATURE (29)..(29): Xaa at this position is a single (one, 1) amino acid selected from the following options: Pro Gln Arg Ser Thr Lys Gly Glu Ala Phe
  MISC_FEATURE (30)..(30): Xaa at this position is a single (one, 1) amino acid selected from the following options: Ser Pro Ala Gly Arg Glu Asp Val
  MISC_FEATURE (31)..(31): Xaa at this position is a single (one, 1) amino acid selected from the following options: Glu Asp Lys His Ala Gly Asn Ser Arg Gln Asp Thr Leu Val
  MISC_FEATURE (32)..(32): Xaa at this position is a single (one, 1) amino acid selected from the following options: Asn Asp Tyr Ser Gly Arg His Lys Glu Ala Leu
  MISC_FEATURE (33)..(33): Xaa at this position is a single (one, 1) amino acid selected from the following options: Val Leu Pro His Met Ile Phe Thr Gly Gly Ser Asp Glu Phe
  MISC_FEATURE (34)..(34): Xaa at this position is a single (one, 1) amino acid selected from the following options: Asp Gly His Arg Ser Glu Pro
  MISC_FEATURE (35)..(35): Xaa at this position is a single (one, 1) amino acid selected from the following options: Arg Ser Gly Thr Pro Ala Lys Glu
  MISC_FEATURE (36)..(36): Xaa at this position is a single (one, 1) amino acid selected from the following options: Arg Thr Gly Ser Arg Pro Lys Asp Ala
  MISC_FEATURE (37)..(37): Xaa at this position is a single (one, 1) amino acid selected from the following options: Ala Glu Ser Gly Arg
  MISC_FEATURE (38)..(38): Xaa at this position is a single (one, 1) amino acid selected from the following options: Ala Gly Gln Pro
  MISC_FEATURE (40)..(40): Xaa at this position is a single (one, 1) amino acid selected from the following options: Ile Val Leu Glu Phe
  MISC_FEATURE (41)..(41): Xaa at this position is a single (one, 1) amino acid selected from the following options: Trp Arg Lys Glu Thr Tyr
  MISC_FEATURE (42)..(42): Xaa at this position is a single (one, 1) amino acid selected from the following options: Asn Glu Asp Ala Lys Ser
  MISC_FEATURE (43)..(43): Xaa at this position is a single (one, 1) amino acid selected from the following options: Ala Arg Lys Cys
  MISC_FEATURE (44)..(44): Xaa at this position is a single (one, 1) amino acid selected from the following options: Gly Tyr Glu Pro
  MISC_FEATURE (45)..(45): Xaa at this position is a single (one, 1) amino acid selected from the following options: Val Gly Phe Lys Arg
  MISC_FEATURE (46)..(46): Xaa at this position is a single (one, 1) amino acid selected from the following options: Asp Ala Ser Arg Leu
  MISC_FEATURE (47)..(47): Xaa at this position is a single (one, 1) amino acid selected from the following options: Phe Leu Ile Glu Ser
  MISC_FEATURE (48)..(48): Xaa at this position is a single (one, 1) amino acid selected from the following options: Arg Gly Ala Ile Glu Ser Pro
  MISC_FEATURE (49)..(49): Xaa at this position is a single (one, 1) amino acid selected from the following options: Lys Arg Thr Glu Gln
  MISC_FEATURE (50)..(50): Xaa at this position is a single (one, 1) amino acid selected from the following options: Arg Lys Met
  MISC_FEATURE (51)..(51): Xaa at this position is a single (one, 1) amino acid selected from the following options: Gly Pro Ala Val Leu Ile Met Cys Phe Tyr Trp His Lys Arg Gln Asn Glu Asp Ser Thr
  MISC_FEATURE (52)..(52): Xaa at this position is a single (one, 1) amino acid selected from the following options: Gln Ala Lys Arg Pro Phe Val
  MISC_FEATURE (53)..(53): Xaa at this position is a single (one, 1) amino acid selected from the following options: Ala Ser Arg
  MISC_FEATURE (54)..(54): Xaa at this position is a single (one, 1) amino acid selected from the following options: Lys Glu Asp His Ala Ile
  MISC_FEATURE (55)..(55): Xaa at this position is a single (one, 1) amino acid selected from the following options: Gly Glu Pro Arg
  MISC_FEATURE (56)..(56): Xaa at this position is a single (one, 1) amino acid selected from the following options: Glu Asp Tyr Thr Gln
  MISC_FEATURE (57)..(57): Xaa at this position is a single (one, 1) amino acid selected from the following options: Arg Met Lys
  MISC_FEATURE (58)..(58): Xaa at this position is a single (one, 1) amino acid selected from the following options: Tyr Phe Glu
  MISC_FEATURE (59)..(59): Xaa at this position is a single (one, 1) amino acid selected from the following options: Leu Phe Pro Gln
  MISC_FEATURE (60)..(60): Xaa at this position is a single (one, 1) amino acid selected from the following options: Arg Leu Lys
  MISC_FEATURE (61)..(61): Xaa at this position is a single (one, 1) amino acid selected from the following options: Ala Lys Glu Thr Asp Gln Arg
  MISC_FEATURE (62)..(62): Xaa at this position is a single (one, 1) amino acid selected from the following options: Gln Arg Lys Ala Cys
  MISC_FEATURE (63)..(63): Xaa at this position is a single (one, 1) amino acid selected from the following options: Ser Thr Ala Asn Glu Leu
  MISC_FEATURE (64)..(64): Xaa at this position is a single (one, 1) amino acid selected from the following options: Arg Lys Gln His Ala
  MISC_FEATURE (65)..(65): Xaa at this position is a single (one, 1) amino acid selected from the following options: Glu Gln Lys
  MISC_FEATURE (66)..(66): Xaa at this position is a single (one, 1) amino acid selected from the following options: Gln Lys
  MISC_FEATURE (67)..(67): Xaa at this position is a single (one, 1) amino acid selected from the following options: Leu His Met Glu
  MISC_FEATURE (68)..(68): Xaa at this position is a single (one, 1) amino acid selected from the following options: Ala Leu Glu Thr Asp Ser
  MISC_FEATURE (69)..(69): Xaa at this position is a single (one, 1) amino acid selected from the following options: Ala Thr Arg Ile Ser Asn Val Met Asp
  MISC_FEATURE (70)..(70): Xaa at this position is a single (one, 1) amino acid selected from the following options: Leu Glu
  MISC_FEATURE (71)..(71): Xaa at this position is a single (one, 1) amino acid selected from the following options: Lys Arg Ile
  MISC_FEATURE (72)..(72): Xaa at this position is a single (one, 1) amino acid selected from the following options: Lys Asn Arg Thr Glu
  MISC_FEATURE (73)..(73): Xaa at this position is a single (one, 1) amino acid selected from the following options: Gly Pro Ala Val Leu Ile Met Cys Phe Tyr Trp His Lys Arg Gln Asn Glu Asp Ser Thr
  MISC_FEATURE (75)..(75): Xaa at this position is a single (one, 1) amino acid selected from the following options: Glu Gln Lys Val
  MISC_FEATURE (76)..(76): Xaa at this position is a single (one, 1) amino acid selected from the following options: Glu Asp Asn Lys
  MISC_FEATURE (77)..(77): Xaa at this position is a single (one, 1) amino acid selected from the following options: Glu Val
  MISC_FEATURE (78)..(78): Xaa at this position is a single (one, 1) amino acid selected from the following options: Ile Val
  MISC_FEATURE (79)..(79): Xaa at this position is a single (one, 1) amino acid selected from the following options: Val Thr Ser Asp Asn Gly Ala Glu Gln Tyr Arg
  MISC_FEATURE (80)..(80): Xaa at this position is a single (one, 1) amino acid selected from the following options: Gly Pro Ala Val Leu Ile Met Cys Phe Tyr Trp His Lys Arg Gln Asn Glu Asp Ser Thr
  MISC_FEATURE (81)..(81): Xaa at this position is a single (one, 1) amino acid selected from the following options: Gly Pro Ala Val Leu Ile Met Cys Phe Tyr Trp His Lys Arg Gln Asn Glu Asp Ser Thr
  MISC_FEATURE (82)..(82): Xaa at this position is a single (one, 1) amino acid selected from the following options: Lys Ser Met Val His Ala Arg Gln Glu Ile Leu Val
  MISC_FEATURE (83)..(83): Xaa at this position is a single (one, 1) amino acid selected from the following options: Lys Glu Gln Arg Gly
  MISC_FEATURE (84)..(84): Xaa at this position is a single (one, 1) amino acid selected from the following options: Glu Ala Gln
  MISC_FEATURE (86)..(86): Xaa at this position is a single (one, 1) amino acid selected from the following options: Glu Lys Asp Gln
  MISC_FEATURE (87)..(87): Xaa at this position is a single (one, 1) amino acid selected from the following options: Arg His Leu Gln Cys Val Gln
  MISC_FEATURE (88)..(88): Xaa at this position is a single (one, 1) amino acid selected from the following options: Leu Met
  MISC_FEATURE (89)..(89): Xaa at this position is a single (one, 1) amino acid selected from the following options: Gln Glu Lys
  MISC_FEATURE (90)..(90): Xaa at this position is a single (one, 1) amino acid selected from the following options: Lys Asn Arg Gln
  MISC_FEATURE (91)..(91): Xaa at this position is a single (one, 1) amino acid selected from the following options: Glu Gln Asn
  MISC_FEATURE (92)..(92): Xaa at this position is a single (one, 1) amino acid selected from the following options: Ile Met
  MISC_FEATURE (93)..(93): Xaa at this position is a single (one, 1) amino acid selected from the following options: Glu Gln Asp Ile Lys
  MISC_FEATURE (94)..(94): Xaa at this position is a single (one, 1) amino acid selected from the following options: Arg Gln Lys Glu
  MISC_FEATURE (95)..(95): Xaa at this position is a single (one, 1) amino acid selected from the following options: His Leu Ile
  MISC_FEATURE (96)..(96): Xaa at this position is a single (one, 1) amino acid selected from the following options: Lys Gln Glu
  MISC_FEATURE (97)..(97): Xaa at this position is a single (one, 1) amino acid selected from the following options: Gln Lys Glu Tyr Gly Ser His Asp Asn
  MISC_FEATURE (98)..(98): Xaa at this position is a single (one, 1) amino acid selected from the following options: Lys Arg Ser Ala Asn Thr His Ser Leu
  MISC_FEATURE (99)..(99): Xaa at this position is a single (one, 1) amino acid selected from the following options: Ile Met Asp Val
  MISC_FEATURE (100)..(100): Xaa at this position is a single (one, 1) amino acid selected from the following options: Lys Gln Arg Asn
  MISC_FEATURE (101)..(101): Xaa at this position is a single (one, 1) amino acid selected from the following options: Met Thr Lys His Tyr Ser Gln Ile Val Asn Asp Arg
  MISC_FEATURE (103)..(103): Xaa at this position is a single (one, 1) amino acid selected from the following options: Lys Asn Ser His Arg Thr Gly
  MISC_FEATURE (104)..(104): Xaa at this position is a single (one, 1) amino acid selected from the following options: His Asp Asn Ser Arg Gln Glu Tyr Asn Leu Gln Gly
  MISC_FEATURE (105)..(105): Xaa at this position is a single (one, 1) amino acid selected from the following options: Asp His Ser Asn Ile or is absent (no amino acid at this position and so this position is not present)
  MISC_FEATURE (106)..(106): Xaa at this position is a single (one, 1) amino acid selected from the following options: Asp Glu His Gly Asn or is absent (no amino acid at this position and so this position is not present)
  MISC_FEATURE (107)..(107): Xaa at this position is a single (one, 1) amino acid selected from the following options: Asp His or is absent (no amino acid at this position and so this position is not present)
  MISC_FEATURE (108)..(108): Xaa at this position is a single (one, 1) amino acid selected from the following options: Asp Glu or is absent (no amino acid at this position and so this position is not present)
  MISC_FEATURE (109)..(109): Asp or is absent (no amino acid at this position and so this position is not present)
  MISC_FEATURE (110)..(110): Asp or is absent (no amino acid at this position and so this position is not present)
  MISC_FEATURE (111)..(111): Asp or is absent (no amino acid at this position and so this position is not present)
  MISC_FEATURE (112)..(112): Asp or is absent (no amino acid at this position and so this position is not present)
  MISC_FEATURE (113)..(113): Asp or is absent (no amino acid at this position and so this position is not present)
  MISC_FEATURE (114)..(114): Asp or is absent (no amino acid at this position and so this position is not present)
  MISC_FEATURE (115)..(115): Asp or is absent (no amino acid at this position and so this position is not present)
MAXXXXXXXXXXXXXXXXXXXXXXXXXXXXXXXXXXXXAXXXXXXXXXXXXXXXXXXXXXXXXXXXXXXXXXXKXXXXXXXXXXIXXXXXXXXXXXXXXXXLXXXXXXXXXXXXX

SEQ ID NO: 107 - protein, 109 aa, Artificial Sequence
  Designed; as detailed elsewhere in present application
  MISC_FEATURE (3)..(3): Xaa at this position is a single (one, 1) amino acid selected from the following options: Val Gly Ala Thr
  MISC_FEATURE (4)..(4): Xaa at this position is a single (one, 1) amino acid selected from the following options: Thr Ser Pro
  MISC_FEATURE (5)..(5): Xaa at this position is a single (one, 1) amino acid selected from the following options: Ala Val Glu
  MISC_FEATURE (6)..(6): Xaa at this position is a single (one, 1) amino acid selected from the following options: Leu Thr Gln
  MISC_FEATURE (7)..(7): Xaa at this position is a single (one, 1) amino acid selected from the following options: Ala Val
  MISC_FEATURE (8)..(8): Xaa at this position is a single (one, 1) amino acid selected from the following options: Ala Val Leu Ile Thr
  MISC_FEATURE (9)..(9): Xaa at this position is a single (one, 1) amino acid selected from the following options: Arg Gln Trp
  MISC_FEATURE (10)..(10): Xaa at this position is a single (one, 1) amino acid selected from the following options: Thr Val Met Ala Ser Leu
  MISC_FEATURE (11)..(11): Xaa at this position is a single (one, 1) amino acid selected from the following options: Trp Arg Gln
  MISC_FEATURE (12)..(12): Xaa at this position is a single (one, 1) amino acid selected from the following options: Leu Phe Gln
  MISC_FEATURE (13)..(13): Xaa at this position is a single (one, 1) amino acid selected from the following options: Gly Tyr Cys Ala Arg
  MISC_FEATURE (14)..(14): Xaa at this position is a single (one, 1) amino acid selected from the following options: Val Ser Ala Thr Met Arg
  MISC_FEATURE (15)..(15): Xaa at this position is a single (one, 1) amino acid selected from the following options: Trp Leu
  MISC_FEATURE (16)..(16): Xaa at this position is a single (one, 1) amino acid selected from the following options: Gly Ser
  MISC_FEATURE (17)..(17): Xaa at this position is a single (one, 1) amino acid selected from the following options: Val Ala Met
  MISC_FEATURE (18)..(18): Xaa at this position is a single (one, 1) amino acid selected from the following options: Arg Trp Lys Leu
  MISC_FEATURE (19)..(19): Xaa at this position is a single (one, 1) amino acid selected from the following options: Thr Ala Val Ser
  MISC_FEATURE (20)..(20): Xaa at this position is a single (one, 1) amino acid selected from the following options: Met Leu Ile Arg Val Ala Thr
  MISC_FEATURE (21)..(21): Xaa at this position is a single (one, 1) amino acid selected from the following options: Gln Arg
  MISC_FEATURE (22)..(22): Xaa at this position is a single (one, 1) amino acid selected from the following options: Ala Thr Gly Ser
  MISC_FEATURE (23)..(23): Xaa at this position is a single (one, 1) amino acid selected from the following options: Arg Gln Gly Leu
  MISC_FEATURE (24)..(24): Xaa at this position is a single (one, 1) amino acid selected from the following options: Gly Ser
  MISC_FEATURE (25)..(25): Xaa at this position is a single (one, 1) amino acid selected from the following options: Phe Tyr
  MISC_FEATURE (26)..(26): Xaa at this position is a single (one, 1) amino acid selected from the following options: Gly Ser Val Ala Thr
  MISC_FEATURE (27)..(27): Xaa at this position is a single (one, 1) amino acid selected from the following options: Ser Cys Arg
  MISC_FEATURE (28)..(28): Xaa at this position is a single (one, 1) amino acid selected from the following options: Asp Glu Gly Ser
  MISC_FEATURE (29)..(29): Xaa at this position is a single (one, 1) amino acid selected from the following options: Gln Arg Ser Thr Lys Pro
  MISC_FEATURE (30)..(30): Xaa at this position is a single (one, 1) amino acid selected from the following options: Ser Pro Ala Gly
  MISC_FEATURE (31)..(31): Xaa at this position is a single (one, 1) amino acid selected from the following options: Glu Asp Lys His Ala Gly Asn
  MISC_FEATURE (32)..(32): Xaa at this position is a single (one, 1) amino acid selected from the following options: Asn Asp Tyr Ser Gly Arg His
  MISC_FEATURE (33)..(33): Xaa at this position is a single (one, 1) amino acid selected from the following options: Val Leu Pro His Met Ile Phe Thr Gly
  MISC_FEATURE (34)..(34): Xaa at this position is a single (one, 1) amino acid selected from the following options: Asp Gly His Arg Ser Glu
  MISC_FEATURE (35)..(35): Xaa at this position is a single (one, 1) amino acid selected from the following options: Arg Ser Gly Thr Pro Ala
  MISC_FEATURE (36)..(36): Xaa at this position is a single (one, 1) amino acid selected from the following options: Gly Ser Arg Pro Lys Asp Arg Thr
  MISC_FEATURE (37)..(37): Xaa at this position is a single (one, 1) amino acid selected from the following options: Ala Glu Ser Glu
  MISC_FEATURE (38)..(38): Xaa at this position is a single (one, 1) amino acid selected from the following options: Gly Ala
  MISC_FEATURE (40)..(40): Xaa at this position is a single (one, 1) amino acid selected from the following options: Ile Val
  MISC_FEATURE (41)..(41): Xaa at this position is a single (one, 1) amino acid selected from the following options: Arg Lys Trp
  MISC_FEATURE (42)..(42): Xaa at this position is a single (one, 1) amino acid selected from the following options: Glu Asp Asn
  MISC_FEATURE (45)..(45): Xaa at this position is a single (one, 1) amino acid selected from the following options: Gly Val
  MISC_FEATURE (46)..(46): Xaa at this position is a single (one, 1) amino acid selected from the following options: Ala Ser Asp
  MISC_FEATURE (48)..(48): Xaa at this position is a single (one, 1) amino acid selected from the following options: Gly Ala Arg
  MISC_FEATURE (49)..(49): Xaa at this position is a single (one, 1) amino acid selected from the following options: Lys Arg
  MISC_FEATURE (50)..(50): Xaa at this position is a single (one, 1) amino acid selected from the following options: Arg Lys
  MISC_FEATURE (52)..(52): Xaa at this position is a single (one, 1) amino acid selected from the following options: Gln Ala Lys Arg
  MISC_FEATURE (53)..(53): Xaa at this position is a single (one, 1) amino acid selected from the following options: Ala Ser
  MISC_FEATURE (54)..(54): Xaa at this position is a single (one, 1) amino acid selected from the following options: Glu Asp Lys
  MISC_FEATURE (55)..(55): Xaa at this position is a single (one, 1) amino acid selected from the following options: Glu Gly
  MISC_FEATURE (56)..(56): Xaa at this position is a single (one, 1) amino acid selected from the following options: Glu Asp
  MISC_FEATURE (59)..(59): Xaa at this position is a single (one, 1) amino acid selected from the following options: Phe Leu
  MISC_FEATURE (60)..(60): Xaa at this position is a single (one, 1) amino acid selected from the following options: Arg Leu
  MISC_FEATURE (61)..(61): Xaa at this position is a single (one, 1) amino acid selected from the following options: Ala Lys Glu Thr
  MISC_FEATURE (62)..(62): Xaa at this position is a single (one, 1) amino acid selected from the following options: Gln Arg Lys
  MISC_FEATURE (63)..(63): Xaa at this position is a single (one, 1) amino acid selected from the following options: Ser Thr Ala Asn
  MISC_FEATURE (64)..(64): Xaa at this position is a single (one, 1) amino acid selected from the following options: Arg Lys
  MISC_FEATURE (65)..(65): Xaa at this position is a single (one, 1) amino acid selected from the following options: Glu Gln
  MISC_FEATURE (68)..(68): Xaa at this position is a single (one, 1) amino acid selected from the following options: Ala Leu Glu Thr
  MISC_FEATURE (69)..(69): Xaa at this position is a single (one, 1) amino acid selected from the following options: Ala Thr Arg Ile
  MISC_FEATURE (71)..(71): Xaa at this position is a single (one, 1) amino acid selected from the following options: Lys Arg
  MISC_FEATURE (76)..(76): Xaa at this position is a single (one, 1) amino acid selected from the following options: Glu Asp Asn
  MISC_FEATURE (78)..(78): Xaa at this position is a single (one, 1) amino acid selected from the following options: Ile Val
  MISC_FEATURE (79)..(79): Xaa at this position is a single (one, 1) amino acid selected from the following options: Val Thr Ser Asp Asn Gly Ala Glu Gln
  MISC_FEATURE (82)..(82): Xaa at this position is a single (one, 1) amino acid selected from the following options: Lys Ser Met Val His Ala Arg Gln Glu
  MISC_FEATURE (83)..(83): Xaa at this position is a single (one, 1) amino acid selected from the following options: Lys Glu Gln Arg
  MISC_FEATURE (86)..(86): Xaa at this position is a single (one, 1) amino acid selected from the following options: Glu Lys
  MISC_FEATURE (87)..(87): Xaa at this position is a single (one, 1) amino acid selected from the following options: Arg His
  MISC_FEATURE (90)..(90): Xaa at this position is a single (one, 1) amino acid selected from the following options: Lys Asn
  MISC_FEATURE (91)..(91): Xaa at this position is a single (one, 1) amino acid selected from the following options: Glu Gln
  MISC_FEATURE (93)..(93): Xaa at this position is a single (one, 1) amino acid selected from the following options: Glu Gln
  MISC_FEATURE (94)..(94): Xaa at this position is a single (one, 1) amino acid selected from the following options: Arg Gln
  MISC_FEATURE (96)..(96): Xaa at this position is a single (one, 1) amino acid selected from the following options: Lys Gln
  MISC_FEATURE (97)..(97): Xaa at this position is a single (one, 1) amino acid selected from the following options: Gln Lys Glu
  MISC_FEATURE (98)..(98): Xaa at this position is a single (one, 1) amino acid selected from the following options: Lys Arg Ser Ala Asn Thr
  MISC_FEATURE (99)..(99): Xaa at this position is a single (one, 1) amino acid selected from the following options: Ile Met
  MISC_FEATURE (100)..(100): Xaa at this position is a single (one, 1) amino acid selected from the following options: Lys Gln
  MISC_FEATURE (101)..(101): Xaa at this position is a single (one, 1) amino acid selected from the following options: Met Thr Lys His Tyr Ser Gln Ile Val Asn
  MISC_FEATURE (103)..(103): Xaa at this position is a single (one, 1) amino acid selected from the following options: Lys Asn Ser His
  MISC_FEATURE (104)..(104): Xaa at this position is a single (one, 1) amino acid selected from the following options: His Asp Asn Ser Arg Gln Glu Tyr
  MISC_FEATURE (105)..(105): Xaa at this position is a single (one, 1) amino acid selected from the following options: Asp His Ser Asn Ile
  MISC_FEATURE (106)..(106): Xaa at this position is a single (one, 1) amino acid selected from the following options: Asp Glu His Gly or is absent (no amino acid at this position and so this position is not present)
  MISC_FEATURE (107)..(107): Xaa at this position is a single (one, 1) amino acid selected from the following options: Asp His or is absent (no amino acid at this position and so this position is not present)
  MISC_FEATURE (108)..(108): Xaa at this position is a single (one, 1) amino acid selected from the following options: Asp or is absent (no amino acid at this position and so this position is not present)
  MISC_FEATURE (109)..(109): Xaa at this position is a single (one, 1) amino acid selected from the following options: Asp or is absent (no amino acid at this position and so this position is not present)
MAXXXXXXXXXXXXXXXXXXXXXXXXXXXXXXXXXXXXAXXXAGXXFXXXAXXXXXRYXXXXXXXQLXXLXKAKEXEXXAAXXEIXXLQXXIXXHXXXXXXLXXXXXXX

SEQ ID NO: 108 - protein, 109 aa, Artificial Sequence
  Designed; as detailed elsewhere in present application
  MISC_FEATURE (3)..(3): Xaa at this position is a single (one, 1) amino acid selected from the following options: Val Ala
  MISC_FEATURE (7)..(7): Xaa at this position is a single (one, 1) amino acid selected from the following options: Ala Val
  MISC_FEATURE (11)..(11): Xaa at this position is a single (one, 1) amino acid selected from the following options: Trp Arg
  MISC_FEATURE (12)..(12): Xaa at this position is a single (one, 1) amino acid selected from the following options: Leu Phe
  MISC_FEATURE (16)..(16): Xaa at this position is a single (one, 1) amino acid selected from the following options: Gly Ser
  MISC_FEATURE (18)..(18): Xaa at this position is a single (one, 1) amino acid selected from the following options: Arg Trp
  MISC_FEATURE (19)..(19): Xaa at this position is a single (one, 1) amino acid selected from the following options: Thr Ala
  MISC_FEATURE (22)..(22): Xaa at this position is a single (one, 1) amino acid selected from the following options: Ala Gly
  MISC_FEATURE (28)..(28): Xaa at this position is a single (one, 1) amino acid selected from the following options: Asp Glu
  MISC_FEATURE (29)..(29): Xaa at this position is a single (one, 1) amino acid selected from the following options: Gln Ser
  MISC_FEATURE (30)..(30): Xaa at this position is a single (one, 1) amino acid selected from the following options: Ser Ala
  MISC_FEATURE (31)..(31): Xaa at this position is a single (one, 1) amino acid selected from the following options: Glu Asp
  MISC_FEATURE (33)..(33): Xaa at this position is a single (one, 1) amino acid selected from the following options: Val Leu
  MISC_FEATURE (34)..(34): Xaa at this position is a single (one, 1) amino acid selected from the following options: Asp Gly
  MISC_FEATURE (35)..(35): Xaa at this position is a single (one, 1) amino acid selected from the following options: Arg Ser
  MISC_FEATURE (36)..(36): Xaa at this position is a single (one, 1) amino acid selected from the following options: Gly Ser
  MISC_FEATURE (40)..(40): Xaa at this position is a single (one, 1) amino acid selected from the following options: Ile Val
  MISC_FEATURE (42)..(42): Xaa at this position is a single (one, 1) amino acid selected from the following options: Glu Asp
  MISC_FEATURE (50)..(50): Xaa at this position is a single (one, 1) amino acid selected from the following options: Arg Lys
  MISC_FEATURE (54)..(54): Xaa at this position is a single (one, 1) amino acid selected from the following options: Glu Asp
  MISC_FEATURE (56)..(56): Xaa at this position is a single (one, 1) amino acid selected from the following options: Glu Asp
  MISC_FEATURE (62)..(62): Xaa at this position is a single (one, 1) amino acid selected from the following options: Gln Arg
  MISC_FEATURE (63)..(63): Xaa at this position is a single (one, 1) amino acid selected from the following options: Ser Thr Ala
  MISC_FEATURE (64)..(64): Xaa at this position is a single (one, 1) amino acid selected from the following options: Arg Lys
  MISC_FEATURE (71)..(71): Xaa at this position is a single (one, 1) amino acid selected from the following options: Lys Arg
  MISC_FEATURE (76)..(76): Xaa at this position is a single (one, 1) amino acid selected from the following options: Glu Asp Asn
  MISC_FEATURE (79)..(79): Xaa at this position is a single (one, 1) amino acid selected from the following options: Val Ser
  MISC_FEATURE (82)..(82): Xaa at this position is a single (one, 1) amino acid selected from the following options: Lys Val Met
  MISC_FEATURE (87)..(87): Xaa at this position is a single (one, 1) amino acid selected from the following options: Arg His
  MISC_FEATURE (91)..(91): Xaa at this position is a single (one, 1) amino acid selected from the following options: Glu Gln
  MISC_FEATURE (98)..(98): Xaa at this position is a single (one, 1) amino acid selected from the following options: Lys Ser
  MISC_FEATURE (101)..(101): Xaa at this position is a single (one, 1) amino acid selected from the following options: Met Thr Lys
  MISC_FEATURE (106)..(106): Asp or is absent (no amino acid at this position and so this position is not present)
  MISC_FEATURE (107)..(107): Asp or is absent (no amino acid at this position and so this position is not present)
  MISC_FEATURE (108)..(108): Asp or is absent (no amino acid at this position and so this position is not present)
  MISC_FEATURE (109)..(109): Asp or is absent (no amino acid at this position and so this position is not present)
MAXTALXARTXXGVWXVXXMQXRGFGSXXXXNXXXXAGAXRXAGGAFGKXAQAXEXRYFRAXXXEQLAALXKAKEXEIXAAXKEIEXLQKXIERHKQXIKXLKHDXXXX

SEQ ID NO: 109 - protein, 107 aa, Artificial Sequence
  Designed; as detailed elsewhere in present application
  misc_feature (3)..(3): Xaa at this position is a single (one, 1) amino acid selected from the following options: Ala Thr Val
  misc_feature (4)..(4): Xaa at this position is a single (one, 1) amino acid selected from the following options: Thr Ser
  misc_feature (5)..(5): Xaa at this position is a single (one, 1) amino acid selected from the following options: Ala Glu
  misc_feature (7)..(7): Xaa at this position is a single (one, 1) amino acid selected from the following options: Ala Val
  misc_feature (9)..(9): Xaa at this position is a single (one, 1) amino acid selected from the following options: Arg Trp
  misc_feature (10)..(10): Xaa at this position is a single (one, 1) amino acid selected from the following options: Thr Met
  misc_feature (11)..(11): Xaa at this position is a single (one, 1) amino acid selected from the following options: Arg Gln Trp
  misc_feature (12)..(12): Xaa at this position is a single (one, 1) amino acid selected from the following options: Phe Leu
  misc_feature (13)..(13): Xaa at this position is a single (one, 1) amino acid selected from the following options: Gly Arg Tyr Cys
  misc_feature (14)..(14): Xaa at this position is a single (one, 1) amino acid selected from the following options: Val Ser Ala Met
  misc_feature (15)..(15): Xaa at this position is a single (one, 1) amino acid selected from the following options: Trp Leu
  misc_feature (16)..(16): Xaa at this position is a single (one, 1) amino acid selected from the following options: Ser Gly
  misc_feature (17)..(17): Xaa at this position is a single (one, 1) amino acid selected from the following options: Val Ala
  misc_feature (18)..(18): Xaa at this position is a single (one, 1) amino acid selected from the following options: Trp Arg
  misc_feature (19)..(19): Xaa at this position is a single (one, 1) amino acid selected from the following options: Ala Thr Val
  misc_feature (20)..(20): Xaa at this position is a single (one, 1) amino acid selected from the following options: Met Val Arg
  misc_feature (22)..(22): Xaa at this position is a single (one, 1) amino acid selected from the following options: Gly Ala Thr
  misc_feature (23)..(23): Xaa at this position is a single (one, 1) amino acid selected from the following options: Arg Leu Gln
  misc_feature (24)..(24): Xaa at this position is a single (one, 1) amino acid selected from the following options: Gly Ser
  misc_feature (26)..(26): Xaa at this position is a single (one, 1) amino acid selected from the following options: Gly Ser
  misc_feature (28)..(28): Xaa at this position is a single (one, 1) amino acid selected from the following options: Glu Asp
  misc_feature (29)..(29): Xaa at this position is a single (one, 1) amino acid selected from the following options: Ser Gln Pro
  misc_feature (30)..(30): Xaa at this position is a single (one, 1) amino acid selected from the following options: Ala Ser Pro
  misc_feature (31)..(31): Xaa at this position is a single (one, 1) amino acid selected from the following options: Asp Glu His
  misc_feature (32)..(32): Xaa at this position is a single (one, 1) amino acid selected from the following options: Asn Asp
  misc_feature (33)..(33): Xaa at this position is a single (one, 1) amino acid selected from the following options: Leu Val
  misc_feature (34)..(34): Xaa at this position is a single (one, 1) amino acid selected from the following options: Gly Asp Arg
  misc_feature (35)..(35): Xaa at this position is a single (one, 1) amino acid selected from the following options: Ser Arg
  misc_feature (36)..(36): Xaa at this position is a single (one, 1) amino acid selected from the following options: Ser Gly Thr Arg
  misc_feature (37)..(37): Xaa at this position is a single (one, 1) amino acid selected from the following options: Ala Glu Ser
  misc_feature (38)..(38): Xaa at this position is a single (one, 1) amino acid selected from the following options: Gly Ala
  misc_feature (40)..(40): Xaa at this position is a single (one, 1) amino acid selected from the following options: Ile Val
  misc_feature (41)..(41): Xaa at this position is a single (one, 1) amino acid selected from the following options: Arg Trp
  misc_feature (42)..(42): Xaa at this position is a single (one, 1) amino acid selected from the following options: Asp Asn Glu
  misc_feature (45)..(45): Xaa at this position is a single (one, 1) amino acid selected from the following options: Gly Val
  misc_feature (46)..(46): Xaa at this position is a single (one, 1) amino acid selected from the following options: Ala Asp
  misc_feature (48)..(48): Xaa at this position is a single (one, 1) amino acid selected from the following options: Gly Arg Ala
  misc_feature (50)..(50): Xaa at this position is a single (one, 1) amino acid selected from the following options: Lys Arg
  misc_feature (52)..(52): Xaa at this position is a single (one, 1) amino acid selected from the following options: Gln Ala
  misc_feature (54)..(54): Xaa at this position is a single (one, 1) amino acid selected from the following options: Glu Lys
  misc_feature (55)..(55): Xaa at this position is a single (one, 1) amino acid selected from the following options: Glu Gly
  misc_feature (59)..(59): Xaa at this position is a single (one, 1) amino acid selected from the following options: Phe Leu
  misc_feature (62)..(62): Xaa at this position is a single (one, 1) amino acid selected from the following options: Arg Gln
  misc_feature (63)..(63): Xaa at this position is a single (one, 1) amino acid selected from the following options: Ala Ser Thr
  misc_feature (64)..(64): Xaa at this position is a single (one, 1) amino acid selected from the following options: Lys Arg
  misc_feature (68)..(68): Xaa at this position is a single (one, 1) amino acid selected from the following options: Ala Thr
  misc_feature (69)..(69): Xaa at this position is a single (one, 1) amino acid selected from the following options: Ala Thr
  misc_feature (76)..(76): Xaa at this position is a single (one, 1) amino acid selected from the following options: Asn Glu Asp
  misc_feature (79)..(79): Xaa at this position is a single (one, 1) amino acid selected from the following options: Ser Thr Gly Val
  misc_feature (82)..(82): Xaa at this position is a single (one, 1) amino acid selected from the following options: Val Met Lys Glu
  misc_feature (87)..(87): Xaa at this position is a single (one, 1) amino acid selected from the following options: His Arg
  misc_feature (90)..(90): Xaa at this position is a single (one, 1) amino acid selected from the following options: Lys Asn
  misc_feature (98)..(98): Xaa at this position is a single (one, 1) amino acid selected from the following options: Ser Lys
  misc_feature (101)..(101): Xaa at this position is a single (one, 1) amino acid selected from the following options: Lys Met Ile Thr
  misc_feature (104)..(104): Xaa at this position is a single (one, 1) amino acid selected from the following options: His Gln Arg Asp
  misc_feature (105)..(105): Xaa at this position is a single (one, 1) amino acid selected from the following options: Asp Asn
  misc_feature (107)..(107): Asp or is absent (no amino acid at this position and so this position is not present)
MAXXXLXAXXXXXXXXXXXXQXXXFXSXXXXXXXXXXXAXXXAGXXFXKXAXAXXERYXRAXXXEQLXXLKKAKEXEIXAAXKEIEXLQXEIERHKQXIKXLKXXDX

SEQ ID NO: 110 - protein, 107 aa, Artificial Sequence
  Designed; as detailed elsewhere in present application
  MISC_FEATURE (11)..(11): Xaa at this position is a single (one, 1) amino acid selected from the following options: Arg Trp
  MISC_FEATURE (12)..(12): Xaa at this position is a single (one, 1) amino acid selected from the following options: Phe Leu
  MISC_FEATURE (16)..(16): Xaa at this position is a single (one, 1) amino acid selected from the following options: Ser Gly
  MISC_FEATURE (18)..(18): Xaa at this position is a single (one, 1) amino acid selected from the following options: Trp Arg
  MISC_FEATURE (19)..(19): Xaa at this position is a single (one, 1) amino acid selected from the following options: Ala Thr
  MISC_FEATURE (22)..(22): Xaa at this position is a single (one, 1) amino acid selected from the following options: Gly Ala
  MISC_FEATURE (28)..(28): Xaa at this position is a single (one, 1) amino acid selected from the following options: Glu Asp
  MISC_FEATURE (29)..(29): Xaa at this position is a single (one, 1) amino acid selected from the following options: Ser Gln
  MISC_FEATURE (30)..(30): Xaa at this position is a single (one, 1) amino acid selected from the following options: Ala Ser
  MISC_FEATURE (31)..(31): Xaa at this position is a single (one, 1) amino acid selected from the following options: Asp Glu
  MISC_FEATURE (34)..(34): Xaa at this position is a single (one, 1) amino acid selected from the following options: Gly Asp
  MISC_FEATURE (35)..(35): Xaa at this position is a single (one, 1) amino acid selected from the following options: Ser Arg
  MISC_FEATURE (36)..(36): Xaa at this position is a single (one, 1) amino acid selected from the following options: Ser Gly
  MISC_FEATURE (40)..(40): Xaa at this position is a single (one, 1) amino acid selected from the following options: Ile Val
  MISC_FEATURE (42)..(42): Xaa at this position is a single (one, 1) amino acid selected from the following options: Asp Glu
  MISC_FEATURE (50)..(50): Xaa at this position is a single (one, 1) amino acid selected from the following options: Lys Arg
  MISC_FEATURE (62)..(62): Xaa at this position is a single (one, 1) amino acid selected from the following options: Arg Gln
  MISC_FEATURE (64)..(64): Xaa at this position is a single (one, 1) amino acid selected from the following options: Lys Arg
  MISC_FEATURE (76)..(76): Xaa at this position is a single (one, 1) amino acid selected from the following options: Asn Glu Asp
  MISC_FEATURE (79)..(79): Xaa at this position is a single (one, 1) amino acid selected from the following options: Ser Val
  MISC_FEATURE (82)..(82): Xaa at this position is a single (one, 1) amino acid selected from the following options: Val Met Lys
  MISC_FEATURE (87)..(87): Xaa at this position is a single (one, 1) amino acid selected from the following options: His Arg
  MISC_FEATURE (98)..(98): Xaa at this position is a single (one, 1) amino acid selected from the following options: Ser Lys
MAATALAARTXXGVWXVXXMQXRGFGSXXXXNLXXXAGAXRXAGGAFGKXAQAEEERYFRAXAXEQLAALKKAKEXEIXAAXKEIEXLQKEIERHKQXIKKLKHDDD

SEQ ID NO: 111 - protein, 108 aa, Artificial Sequence
  Designed; as detailed elsewhere in present application
  MISC_FEATURE (3)..(3): Xaa at this position is a single (one, 1) amino acid selected from the following options: Val Ala Thr
  MISC_FEATURE (4)..(4): Xaa at this position is a single (one, 1) amino acid selected from the following options: Thr Val
  MISC_FEATURE (5)..(5): Xaa at this position is a single (one, 1) amino acid selected from the following options: Ala Glu
  MISC_FEATURE (7)..(7): Xaa at this position is a single (one, 1) amino acid selected from the following options: Ala Val
  MISC_FEATURE (9)..(9): Xaa at this position is a single (one, 1) amino acid selected from the following options: Arg Trp
  MISC_FEATURE (10)..(10): Xaa at this position is a single (one, 1) amino acid selected from the following options: Thr Met Val
  MISC_FEATURE (11)..(11): Xaa at this position is a single (one, 1) amino acid selected from the following options: Arg Trp Gln
  MISC_FEATURE (12)..(12): Xaa at this position is a single (one, 1) amino acid selected from the following options: Leu Phe
  MISC_FEATURE (13)..(13): Xaa at this position is a single (one, 1) amino acid selected from the following options: Gly Arg Tyr Cys
  MISC_FEATURE (14)..(14): Xaa at this position is a single (one, 1) amino acid selected from the following options: Val Ser Ala
  MISC_FEATURE (15)..(15): Xaa at this position is a single (one, 1) amino acid selected from the following options: Trp Leu
  MISC_FEATURE (16)..(16): Xaa at this position is a single (one, 1) amino acid selected from the following options: Gly Ser
  MISC_FEATURE (17)..(17): Xaa at this position is a single (one, 1) amino acid selected from the following options: Val Ala
  MISC_FEATURE (18)..(18): Xaa at this position is a single (one, 1) amino acid selected from the following options: Trp Arg
  MISC_FEATURE (19)..(19): Xaa at this position is a single (one, 1) amino acid selected from the following options: Ala Thr Val
  MISC_FEATURE (20)..(20): Xaa at this position is a single (one, 1) amino acid selected from the following options: Met Val
  MISC_FEATURE (22)..(22): Xaa at this position is a single (one, 1) amino acid selected from the following options: Gly Ala
  MISC_FEATURE (23)..(23): Xaa at this position is a single (one, 1) amino acid selected from the following options: Arg Gln Leu
  MISC_FEATURE (24)..(24): Xaa at this position is a single (one, 1) amino acid selected from the following options: Gly Met
  MISC_FEATURE (25)..(25): Xaa at this position is a single (one, 1) amino acid selected from the following options: Phe Gln
  MISC_FEATURE (26)..(26): Xaa at this position is a single (one, 1) amino acid selected from the following options: Gly Ser
  MISC_FEATURE (28)..(28): Xaa at this position is a single (one, 1) amino acid selected from the following options: Glu Asp
  MISC_FEATURE (29)..(29): Xaa at this position is a single (one, 1) amino acid selected from the following options: Ser Pro Gln
  MISC_FEATURE (30)..(30): Xaa at this position is a single (one, 1) amino acid selected from the following options: Ala Ser Pro
  MISC_FEATURE (31)..(31): Xaa at this position is a single (one, 1) amino acid selected from the following options: Asp Glu His
  MISC_FEATURE (32)..(32): Xaa at this position is a single (one, 1) amino acid selected from the following options: Asn Asp
  MISC_FEATURE (33)..(33): Xaa at this position is a single (one, 1) amino acid selected from the following options: Leu Val
  MISC_FEATURE (34)..(34): Xaa at this position is a single (one, 1) amino acid selected from the following options: Gly Asp Arg
  MISC_FEATURE (35)..(35): Xaa at this position is a single (one, 1) amino acid selected from the following options: Ser Arg
  MISC_FEATURE (36)..(36): Xaa at this position is a single (one, 1) amino acid selected from the following options: Ser Gly Arg Thr
  MISC_FEATURE (37)..(37): Xaa at this position is a single (one, 1) amino acid selected from the following options: Ala Glu
  MISC_FEATURE (38)..(38): Xaa at this position is a single (one, 1) amino acid selected from the following options: Gly Ala
  MISC_FEATURE (40)..(40): Xaa at this position is a single (one, 1) amino acid selected from the following options: Val Ile
  MISC_FEATURE (41)..(41): Xaa at this position is a single (one, 1) amino acid selected from the following options: Arg Trp
  MISC_FEATURE (42)..(42): Xaa at this position is a single (one, 1) amino acid selected from the following options: Asp Glu Asn
  MISC_FEATURE (45)..(45): Xaa at this position is a single (one, 1) amino acid selected from the following options: Gly Val
  MISC_FEATURE (46)..(46): Xaa at this position is a single (one, 1) amino acid selected from the following options: Ala Asp
  MISC_FEATURE (48)..(48): Xaa at this position is a single (one, 1) amino acid selected from the following options: Gly Arg Ala
  MISC_FEATURE (50)..(50): Xaa at this position is a single (one, 1) amino acid selected from the following options: Arg Lys
  MISC_FEATURE (52)..(52): Xaa at this position is a single (one, 1) amino acid selected from the following options: Gln Ala
  MISC_FEATURE (54)..(54): Xaa at this position is a single (one, 1) amino acid selected from the following options: Glu Lys
  MISC_FEATURE (55)..(55): Xaa at this position is a single (one, 1) amino acid selected from the following options: Glu Gly
  MISC_FEATURE (56)..(56): Xaa at this position is a single (one, 1) amino acid selected from the following options: Glu Gln
  MISC_FEATURE (59)..(59): Xaa at this position is a single (one, 1) amino acid selected from the following options: Phe Leu
  MISC_FEATURE (62)..(62): Xaa at this position is a single (one, 1) amino acid selected from the following options: Arg Gln Cys
  MISC_FEATURE (63)..(63): Xaa at this position is a single (one, 1) amino acid selected from the following options: Ala Ser
  MISC_FEATURE (64)..(64): Xaa at this position is a single (one, 1) amino acid selected from the following options: Lys Arg
  MISC_FEATURE (69)..(69): Xaa at this position is a single (one, 1) amino acid selected from the following options: Ala Thr
  MISC_FEATURE (76)..(76): Xaa at this position is a single (one, 1) amino acid selected from the following options: Asn Glu
  MISC_FEATURE (79)..(79): Xaa at this position is a single (one, 1) amino acid selected from the following options: Ser Val Thr
  MISC_FEATURE (82)..(82): Xaa at this position is a single (one, 1) amino acid selected from the following options: Val Lys Met Glu
  MISC_FEATURE (87)..(87): Xaa at this position is a single (one, 1) amino acid selected from the following options: His Arg Cys
  MISC_FEATURE (90)..(90): Xaa at this position is a single (one, 1) amino acid selected from the following options: Lys Asn
  MISC_FEATURE (92)..(92): Xaa at this position is a single (one, 1) amino acid selected from the following options: Ile Met
  MISC_FEATURE (94)..(94): Xaa at this position is a single (one, 1) amino acid selected from the following options: Arg Glu
  MISC_FEATURE (98)..(98): Xaa at this position is a single (one, 1) amino acid selected from the following options: Ser Lys Leu
  MISC_FEATURE (99)..(99): Xaa at this position is a single (one, 1) amino acid selected from the following options: Ile Val
  MISC_FEATURE (101)..(101): Xaa at this position is a single (one, 1) amino acid selected from the following options: Lys Met
  MISC_FEATURE (104)..(104): Xaa at this position is a single (one, 1) amino acid selected from the following options: His Gln
  MISC_FEATURE (105)..(105): Xaa at this position is a single (one, 1) amino acid selected from the following options: Asp His
  MISC_FEATURE (107)..(107): Asp or is absent (no amino acid at this position and so this position is not present)
  MISC_FEATURE (108)..(108): Asp or is absent (no amino acid at this position and so this position is not present)
MAXXXLXAXXXXXXXXXXXXQXXXXXSXXXXXXXXXXXAXXXAGXXFXKXAXAXXXRYXRAXXXEQLAXLKKAKEXEIXAAXKEIEXLQXEXEXHKQXXKXLKXXDXX

SEQ ID NO: 112 - protein, 108 aa, Artificial Sequence
  Designed; as detailed elsewhere in present application
  MISC_FEATURE (16)..(16): Xaa at this position is a single (one, 1) amino acid selected from the following options: Gly Ser
  MISC_FEATURE (18)..(18): Xaa at this position is a single (one, 1) amino acid selected from the following options: Trp Arg
  MISC_FEATURE (19)..(19): Xaa at this position is a single (one, 1) amino acid selected from the following options: Ala Thr
  MISC_FEATURE (22)..(22): Xaa at this position is a single (one, 1) amino acid selected from the following options: Gly Ala
  MISC_FEATURE (23)..(23): Xaa at this position is a single (one, 1) amino acid selected from the following options: Arg Gln
  MISC_FEATURE (26)..(26): Xaa at this position is a single (one, 1) amino acid selected from the following options: Gly Ser
  MISC_FEATURE (28)..(28): Xaa at this position is a single (one, 1) amino acid selected from the following options: Glu Asp
  MISC_FEATURE (29)..(29): Xaa at this position is a single (one, 1) amino acid selected from the following options: Ser Gln
  MISC_FEATURE (30)..(30): Xaa at this position is a single (one, 1) amino acid selected from the following options: Ala Ser
  MISC_FEATURE (31)..(31): Xaa at this position is a single (one, 1) amino acid selected from the following options: Asp Glu
  MISC_FEATURE (32)..(32): Xaa at this position is a single (one, 1) amino acid selected from the following options: Asn Asp
  MISC_FEATURE (34)..(34): Xaa at this position is a single (one, 1) amino acid selected from the following options: Gly Asp
  MISC_FEATURE (35)..(35): Xaa at this position is a single (one, 1) amino acid selected from the following options: Ser Arg
  MISC_FEATURE (36)..(36): Xaa at this position is a single (one, 1) amino acid selected from the following options: Ser Gly
  MISC_FEATURE (40)..(40): Xaa at this position is a single (one, 1) amino acid selected from the following options: Val Ile
  MISC_FEATURE (41)..(41): Xaa at this position is a single (one, 1) amino acid selected from the following options: Arg Trp
  MISC_FEATURE (42)..(42): Xaa at this position is a single (one, 1) amino acid selected from the following options: Asp Glu
  MISC_FEATURE (45)..(45): Xaa at this position is a single (one, 1) amino acid selected from the following options: Gly Val
  MISC_FEATURE (46)..(46): Xaa at this position is a single (one, 1) amino acid selected from the following options: Ala Asp
  MISC_FEATURE (48)..(48): Xaa at this position is a single (one, 1) amino acid selected from the following options: Gly Ala
  MISC_FEATURE (50)..(50): Xaa at this position is a single (one, 1) amino acid selected from the following options: Arg Lys
  MISC_FEATURE (52)..(52): Xaa at this position is a single (one, 1) amino acid selected from the following options: Gln Ala
  MISC_FEATURE (54)..(54): Xaa at this position is a single (one, 1) amino acid selected from the following options: Glu Lys
  MISC_FEATURE (55)..(55): Xaa at this position is a single (one, 1) amino acid selected from the following options: Glu Gly
  MISC_FEATURE (56)..(56): Xaa at this position is a single (one, 1) amino acid selected from the following options: Glu Gln
  MISC_FEATURE (59)..(59): Xaa at this position is a single (one, 1) amino acid selected from the following options: Phe Leu
  MISC_FEATURE (62)..(62): Xaa at this position is a single (one, 1) amino acid selected from the following options: Arg Gln
  MISC_FEATURE (63)..(63): Xaa at this position is a single (one, 1) amino acid selected from the following options: Ala Ser
  MISC_FEATURE (64)..(64): Xaa at this position is a single (one, 1) amino acid selected from the following options: Lys Arg
  MISC_FEATURE (76)..(76): Xaa at this position is a single (one, 1) amino acid selected from the following options: Asn Glu
  MISC_FEATURE (79)..(79): Xaa at this position is a single (one, 1) amino acid selected from the following options: Ser Val
  MISC_FEATURE (82)..(82): Xaa at this position is a single (one, 1) amino acid selected from the following options: Val Lys
  MISC_FEATURE (87)..(87): Xaa at this position is a single (one, 1) amino acid selected from the following options: His Arg
  MISC_FEATURE (98)..(98): Xaa at this position is a single (one, 1) amino acid selected from the following options: Ser Lys
  MISC_FEATURE (101)..(101): Xaa at this position is a single (one, 1) amino acid selected from the following options: Lys Met
  MISC_FEATURE (108)..(108): Asp or is absent (no amino acid at this position and so this position is not present)
MAATALAARTRFGVWXVXXMQXXGFXSXXXXXLXXXAGAXXXAGXXFXKXAXAXXXRYXRAXXXEQLAALKKAKEXEIXAAXKEIEXLQKEIERHKQXIKXLKHDDDX

SEQ ID NO: 113 - protein, 107 aa, Artificial Sequence
  Designed; as detailed elsewhere in present application
  MISC_FEATURE (3)..(3): Xaa at this position is a single (one, 1) amino acid selected from the following options: Ala Val
  MISC_FEATURE (4)..(4): Xaa at this position is a single (one, 1) amino acid selected from the following options: Thr Val
  MISC_FEATURE (7)..(7): Xaa at this position is a single (one, 1) amino acid selected from the following options: Ala Val
  MISC_FEATURE (9)..(9): Xaa at this position is a single (one, 1) amino acid selected from the following options: Arg Trp
  MISC_FEATURE (10)..(10): Xaa at this position is a single (one, 1) amino acid selected from the following options: Thr Met
  MISC_FEATURE (11)..(11): Xaa at this position is a single (one, 1) amino acid selected from the following options: Arg Gln Trp
  MISC_FEATURE (12)..(12): Xaa at this position is a single (one, 1) amino acid selected from the following options: Phe Leu
  MISC_FEATURE (13)..(13): Xaa at this position is a single (one, 1) amino acid selected from the following options: Gly Arg
  MISC_FEATURE (16)..(16): Xaa at this position is a single (one, 1) amino acid selected from the following options: Gly Ser
  MISC_FEATURE (18)..(18): Xaa at this position is a single (one, 1) amino acid selected from the following options: Arg Trp
  MISC_FEATURE (19)..(19): Xaa at this position is a single (one, 1) amino acid selected from the following options: Thr Val Ala
  MISC_FEATURE (22)..(22): Xaa at this position is a single (one, 1) amino acid selected from the following options: Gly Ala
  MISC_FEATURE (23)..(23): Xaa at this position is a single (one, 1) amino acid selected from the following options: Arg Leu
  MISC_FEATURE (28)..(28): Xaa at this position is a single (one, 1) amino acid selected from the following options: Glu Asp
  MISC_FEATURE (29)..(29): Xaa at this position is a single (one, 1) amino acid selected from the following options: Ser Pro Gln
  MISC_FEATURE (30)..(30): Xaa at this position is a single (one, 1) amino acid selected from the following options: Ala Ser
  MISC_FEATURE (31)..(31): Xaa at this position is a single (one, 1) amino acid selected from the following options: Asp Glu
  MISC_FEATURE (33)..(33): Xaa at this position is a single (one, 1) amino acid selected from the following options: Leu Val
  MISC_FEATURE (34)..(34): Xaa at this position is a single (one, 1) amino acid selected from the following options: Gly Asp
  MISC_FEATURE (35)..(35): Xaa at this position is a single (one, 1) amino acid selected from the following options: Ser Arg
  MISC_FEATURE (36)..(36): Xaa at this position is a single (one, 1) amino acid selected from the following options: Ser Gly
  MISC_FEATURE (37)..(37): Xaa at this position is a single (one, 1) amino acid selected from the following options: Ala Glu
  MISC_FEATURE (38)..(38): Xaa at this position is a single (one, 1) amino acid selected from the following options: Gly Ala
  MISC_FEATURE (40)..(40): Xaa at this position is a single (one, 1) amino acid selected from the following options: Trp Val Ile
  MISC_FEATURE (41)..(41): Xaa at this position is a single (one, 1) amino acid selected from the following options: Arg Trp
  MISC_FEATURE (42)..(42): Xaa at this position is a single (one, 1) amino acid selected from the following options: Asn Glu Asp
  MISC_FEATURE (45)..(45): Xaa at this position is a single (one, 1) amino acid selected from the following options: Gly Val
  MISC_FEATURE (46)..(46): Xaa at this position is a single (one, 1) amino acid selected from the following options: Ala Asp
  MISC_FEATURE (48)..(48): Xaa at this position is a single (one, 1) amino acid selected from the following options: Gly Arg
  MISC_FEATURE (50)..(50): Xaa at this position is a single (one, 1) amino acid selected from the following options: Lys Arg
  MISC_FEATURE (54)..(54): Xaa at this position is a single (one, 1) amino acid selected from the following options: Glu Lys
  MISC_FEATURE (55)..(55): Xaa at this position is a single (one, 1) amino acid selected from the following options: Glu Gly
  MISC_FEATURE (59)..(59): Xaa at this position is a single (one, 1) amino acid selected from the following options: Phe Leu
  MISC_FEATURE (62)..(62): Xaa at this position is a single (one, 1) amino acid selected from the following options: Arg Gln
  MISC_FEATURE (63)..(63): Xaa at this position is a single (one, 1) amino acid selected from the following options: Ala Ser
  MISC_FEATURE (64)..(64): Xaa at this position is a single (one, 1) amino acid selected from the following options: Lys Arg
  MISC_FEATURE (76)..(76): Xaa at this position is a single (one, 1) amino acid selected from the following options: Asn Glu
  MISC_FEATURE (79)..(79): Xaa at this position is a single (one, 1) amino acid selected from the following options: Ser Val
  MISC_FEATURE (82)..(82): Xaa at this position is a single (one, 1) amino acid selected from the following options: Val Lys
  MISC_FEATURE (87)..(87): Xaa at this position is a single (one, 1) amino acid selected from the following options: Arg His
  MISC_FEATURE (98)..(98): Xaa at this position is a single (one, 1) amino acid selected from the following options: Lys Ser
  MISC_FEATURE (101)..(101): Xaa at this position is a single (one, 1) amino acid selected from the following options: Met Lys
  MISC_FEATURE (107)..(107): Asp or is absent (no amino acid at this position and so this position is not present)
MAXXALXAXXXXXVWXVXXMQXXGFGSXXXXNXXXXXXAXXXAGXXFXKXAQAXXERYXRAXXXEQLAALKKAKEXEIXAAXKEIEXLQKEIERHKQXIKXLKHDDX

SEQ ID NO: 114 - protein, 107 aa, Artificial Sequence
  Designed; as detailed elsewhere in present application
MAATALAARTRFGVWSVWAMQGRGFGSESADNLGSSAGAIRDAGGAFGKKAQAEEERYFRARAKEQLAALKKAKENEISAAVKEIEHLQKEIERHKQSIKKLKHDDD

SEQ ID NO: 115 - protein, 107 aa, Artificial Sequence
  Designed; as detailed elsewhere in present application
  MISC_FEATURE (3)..(3): Xaa at this position is a single (one, 1) amino acid selected from the following options: Val Gly Ala Thr
  MISC_FEATURE (4)..(4): Xaa at this position is a single (one, 1) amino acid selected from the following options: Thr Ser Pro
  MISC_FEATURE (5)..(5): Xaa at this position is a single (one, 1) amino acid selected from the following options: Ala Val Glu
  MISC_FEATURE (6)..(6): Xaa at this position is a single (one, 1) amino acid selected from the following options: Leu Thr Gln
  MISC_FEATURE (7)..(7): Xaa at this position is a single (one, 1) amino acid selected from the following options: Ala Val
  MISC_FEATURE (8)..(8): Xaa at this position is a single (one, 1) amino acid selected from the following options: Ala Val Leu Ile Thr
  MISC_FEATURE (9)..(9): Xaa at this position is a single (one, 1) amino acid selected from the following options: Arg Gln Trp
  MISC_FEATURE (10)..(10): Xaa at this position is a single (one, 1) amino acid selected from the following options: Thr Val Met Ala Ser Leu
  MISC_FEATURE (11)..(11): Xaa at this position is a single (one, 1) amino acid selected from the following options: Trp Arg Gln
  MISC_FEATURE (12)..(12): Xaa at this position is a single (one, 1) amino acid selected from the following options: Leu Phe Gln
  MISC_FEATURE (13)..(13): Xaa at this position is a single (one, 1) amino acid selected from the following options: Gly Tyr Cys Ala Arg
  MISC_FEATURE (14)..(14): Xaa at this position is a single (one, 1) amino acid selected from the following options: Val Ser Ala Thr Met Arg
  MISC_FEATURE (15)..(15): Xaa at this position is a single (one, 1) amino acid selected from the following options: Trp Leu
  MISC_FEATURE (16)..(16): Xaa at this position is a single (one, 1) amino acid selected from the following options: Gly Ser
  MISC_FEATURE (17)..(17): Xaa at this position is a single (one, 1) amino acid selected from the following options: Val Ala Met
  MISC_FEATURE (18)..(18): Xaa at this position is a single (one, 1) amino acid selected from the following options: Arg Trp Lys Leu
  MISC_FEATURE (19)..(19): Xaa at this position is a single (one, 1) amino acid selected from the following options: Thr Ala Val Ser
  MISC_FEATURE (20)..(20): Xaa at this position is a single (one, 1) amino acid selected from the following options: Met Leu Ile Arg Val Ala Thr
  MISC_FEATURE (21)..(21): Xaa at this position is a single (one, 1) amino acid selected from the following options: Gln Arg
  MISC_FEATURE (22)..(22): Xaa at this position is a single (one, 1) amino acid selected from the following options: Ala Thr Gly Ser
  MISC_FEATURE (23)..(23): Xaa at this position is a single (one, 1) amino acid selected from the following options: Arg Gln Gly Leu
  MISC_FEATURE (24)..(24): Xaa at this position is a single (one, 1) amino acid selected from the following options: Gly Ser
  MISC_FEATURE (25)..(25): Xaa at this position is a single (one, 1) amino acid selected from the following options: Phe Tyr
MAXXXXXXXXXXXXXXXXXXXXXXXGSESADNLGSSAGAIRDAGGAFGKKAQAEEERYFRARAKEQLAALKKAKENEISAAVKEIEHLQKEIERHKQSIKKLKHDDD

SEQ ID NO: 116 - protein, 107 aa, Artificial Sequence
  Designed; as detailed elsewhere in present application
MAVTALAARTWLGVWGVRTMQARGFGSESADNLGSSAGAIRDAGGAFGKKAQAEEERYFRARAKEQLAALKKAKENEISAAVKEIEHLQKEIERHKQSIKKLKHDDD

SEQ ID NO: 117 - protein, 107 aa, Artificial Sequence
  Designed; as detailed elsewhere in present application
MAGSALAVRARFGVWGMKVLQTRGFGSESADNLGSSAGAIRDAGGAFGKKAQAEEERYFRARAKEQLAALKKAKENEISAAVKEIEHLQKEIERHKQSIKKLKHDDD

SEQ ID NO: 118 - protein, 110 aa, Artificial Sequence
  Designed; as detailed elsewhere in present application
  MISC_FEATURE (3)..(3): Xaa at this position is a single (one, 1) amino acid selected from the following options: Val Gly Ala Thr
  MISC_FEATURE (4)..(4): Xaa at this position is a single (one, 1) amino acid selected from the following options: Thr Ser Pro
  MISC_FEATURE (5)..(5): Xaa at this position is a single (one, 1) amino acid selected from the following options: Glu Ala Val
  MISC_FEATURE (6)..(6): Xaa at this position is a single (one, 1) amino acid selected from the following options: Leu Thr Gln
  MISC_FEATURE (7)..(7): Xaa at this position is a single (one, 1) amino acid selected from the following options: Ala Val
  MISC_FEATURE (8)..(8): Xaa at this position is a single (one, 1) amino acid selected from the following options: Ala Val Leu Ile Thr
  MISC_FEATURE (9)..(9): Xaa at this position is a single (one, 1) amino acid selected from the following options: Trp Arg Gln
  MISC_FEATURE (10)..(10): Xaa at this position is a single (one, 1) amino acid selected from the following options: Thr Val Met Ala Ser Leu
  MISC_FEATURE (11)..(11): Xaa at this position is a single (one, 1) amino acid selected from the following options: Gln Trp Arg
  MISC_FEATURE (12)..(12): Xaa at this position is a single (one, 1) amino acid selected from the following options: Leu Phe Gln
  MISC_FEATURE (13)..(13): Xaa at this position is a single (one, 1) amino acid selected from the following options: Arg Gly Tyr Cys Ala
  MISC_FEATURE (14)..(14): Xaa at this position is a single (one, 1) amino acid selected from the following options: Val Ser Ala Thr Met Arg
  MISC_FEATURE (15)..(15): Xaa at this position is a single (one, 1) amino acid selected from the following options: Trp Leu
  MISC_FEATURE (16)..(16): Xaa at this position is a single (one, 1) amino acid selected from the following options: Gly Ser
  MISC_FEATURE (17)..(17): Xaa at this position is a single (one, 1) amino acid selected from the following options: Val Ala Met
  MISC_FEATURE (18)..(18): Xaa at this position is a single (one, 1) amino acid selected from the following options: Arg Trp Lys Leu
  MISC_FEATURE (19)..(19): Xaa at this position is a single (one, 1) amino acid selected from the following options: Thr Ala Val Ser
  MISC_FEATURE (20)..(20): Xaa at this position is a single (one, 1) amino acid selected from the following options: Met Leu Ile Arg Val Ala Thr
  MISC_FEATURE (21)..(21): Xaa at this position is a single (one, 1) amino acid selected from the following options: Gln Arg
  MISC_FEATURE (22)..(22): Xaa at this position is a single (one, 1) amino acid selected from the following options: Ala Thr Gly Ser
  MISC_FEATURE (23)..(23): Xaa at this position is a single (one, 1) amino acid selected from the following options: Leu Arg Gln Gly
  MISC_FEATURE (24)..(24): Xaa at this position is a single (one, 1) amino acid selected from the following options: Gly Ser
  MISC_FEATURE (25)..(25): Xaa at this position is a single (one, 1) amino acid selected from the following options: Phe Tyr
  MISC_FEATURE (26)..(26): Xaa at this position is a single (one, 1) amino acid selected from the following options: Gly Ser Val Ala Thr Leu Arg Phe Ile Lys Met Gln Asn
  MISC_FEATURE (27)..(27): Xaa at this position is a single (one, 1) amino acid selected from the following options: Ser Cys Arg Gly Phe Thr Pro
  MISC_FEATURE (28)..(28): Xaa at this position is a single (one, 1) amino acid selected from the following options: Asp Glu Gly Ser Phe Lys Thr Leu Phe Pro
  MISC_FEATURE (29)..(29): Xaa at this position is a single (one, 1) amino acid selected from the following options: Pro Gln Arg Ser Thr Lys Gly Glu Ala Phe
  MISC_FEATURE (30)..(30): Xaa at this position is a single (one, 1) amino acid selected from the following options: Ser Pro Ala Gly Arg Glu Asp Val
  MISC_FEATURE (31)..(31): Xaa at this position is a single (one, 1) amino acid selected from the following options: Glu Asp Lys His Ala Gly Asn Ser Arg Gln Asp Thr Leu Val
  MISC_FEATURE (32)..(32): Xaa at this position is a single (one, 1) amino acid selected from the following options: Asn Asp Tyr Ser Gly Arg His Lys Glu Ala Leu
  MISC_FEATURE (33)..(33): Xaa at this position is a single (one, 1) amino acid selected from the following options: Val Leu Pro His Met Ile Phe Thr Gly Gly Ser Asp Glu Phe
  MISC_FEATURE (34)..(34): Xaa at this position is a single (one, 1) amino acid selected from the following options: Asp Gly His Arg Ser Glu Pro
  MISC_FEATURE (35)..(35): Xaa at this position is a single (one, 1) amino acid selected from the following options: Arg Ser Gly Thr Pro Ala Lys Glu
  MISC_FEATURE (36)..(36): Xaa at this position is a single (one, 1) amino acid selected from the following options: Arg Thr Gly Ser Arg Pro Lys Asp Ala
  MISC_FEATURE (37)..(37): Xaa at this position is a single (one, 1) amino acid selected from the following options: Ala Glu Ser Gly Arg
  MISC_FEATURE (38)..(38): Xaa at this position is a single (one, 1) amino acid selected from the following options: Ala Gly Gln Pro
  MISC_FEATURE (40)..(40): Xaa at this position is a single (one, 1) amino acid selected from the following options: Ile Val Leu Glu Phe
  MISC_FEATURE (41)..(41): Xaa at this position is a single (one, 1) amino acid selected from the following options: Trp Arg Lys Glu Thr Tyr
  MISC_FEATURE (42)..(42): Xaa at this position is a single (one, 1) amino acid selected from the following options: Asn Glu Asp Ala Lys Ser
  MISC_FEATURE (43)..(43): Xaa at this position is a single (one, 1) amino acid selected from the following options: Ala Arg Lys Cys
  MISC_FEATURE (44)..(44): Xaa at this position is a single (one, 1) amino acid selected from the following options: Gly Tyr Glu Pro
  MISC_FEATURE (45)..(45): Xaa at this position is a single (one, 1) amino acid selected from the following options: Val Gly Phe Lys Arg
  MISC_FEATURE (46)..(46): Xaa at this position is a single (one, 1) amino acid selected from the following options: Asp Ala Ser Arg Leu
  MISC_FEATURE (47)..(47): Xaa at this position is a single (one, 1) amino acid selected from the following options: Phe Leu Ile Glu Ser
  MISC_FEATURE (48)..(48): Xaa at this position is a single (one, 1) amino acid selected from the following options: Arg Gly Ala Ile Glu Ser Pro
  MISC_FEATURE (49)..(49): Xaa at this position is a single (one, 1) amino acid selected from the following options: Lys Arg Thr Glu Gln
  MISC_FEATURE (50)..(50): Xaa at this position is a single (one, 1) amino acid selected from the following options: Arg Lys Met
  MISC_FEATURE (52)..(52): Xaa at this position is a single (one, 1) amino acid selected from the following options: Gln Ala Lys Arg Pro Phe Val
  MISC_FEATURE (53)..(53): Xaa at this position is a single (one, 1) amino acid selected from the following options: Ala Ser Arg
  MISC_FEATURE (54)..(54): Xaa at this position is a single (one, 1) amino acid selected from the following options: Lys Glu Asp His Ala Ile
  MISC_FEATURE (55)..(55): Xaa at this position is a single (one, 1) amino acid selected from the following options: Gly Glu Pro Arg
  MISC_FEATURE (56)..(56): Xaa at this position is a single (one, 1) amino acid selected from the following options: Glu Asp Tyr Thr Gln
  MISC_FEATURE (57)..(57): Xaa at this position is a single (one, 1) amino acid selected from the following options: Arg Met Lys
  MISC_FEATURE (58)..(58): Xaa at this position is a single (one, 1) amino acid selected from the following options: Tyr Phe Glu
  MISC_FEATURE (59)..(59): Xaa at this position is a single (one, 1) amino acid selected from the following options: Leu Phe Pro Gln
  MISC_FEATURE (60)..(60): Xaa at this position is a single (one, 1) amino acid selected from the following options: Arg Leu Lys
  MISC_FEATURE (61)..(61): Xaa at this position is a single (one, 1) amino acid selected from the following options: Ala Lys Glu Thr Asp Gln Arg
  MISC_FEATURE (62)..(62): Xaa at this position is a single (one, 1) amino acid selected from the following options: Gln Arg Lys Ala Cys
  MISC_FEATURE (63)..(63): Xaa at this position is a single (one, 1) amino acid selected from the following options: Ser Thr Ala Asn Glu Leu
  MISC_FEATURE (64)..(64): Xaa at this position is a single (one, 1) amino acid selected from the following options: Arg Lys Gln His Ala
  MISC_FEATURE (65)..(65): Xaa at this position is a single (one, 1) amino acid selected from the following options: Glu Gln Lys
  MISC_FEATURE (66)..(66): Xaa at this position is a single (one, 1) amino acid selected from the following options: Gln Lys
  MISC_FEATURE (67)..(67): Xaa at this position is a single (one, 1) amino acid selected from the following options: Leu His Met Glu
  MISC_FEATURE (68)..(68): Xaa at this position is a single (one, 1) amino acid selected from the following options: Ala Leu Glu Thr Asp Ser
  MISC_FEATURE (69)..(69): Xaa at this position is a single (one, 1) amino acid selected from the following options: Ala Thr Arg Ile Ser Asn Val Met Asp
  MISC_FEATURE (70)..(70): Xaa at this position is a single (one, 1) amino acid selected from the following options: Leu Glu
  MISC_FEATURE (71)..(71): Xaa at this position is a single (one, 1) amino acid selected from the following options: Lys Arg Ile
  MISC_FEATURE (72)..(72): Xaa at this position is a single (one, 1) amino acid selected from the following options: Lys Asn Arg Thr Glu
  MISC_FEATURE (75)..(75): Xaa at this position is a single (one, 1) amino acid selected from the following options: Glu Gln Lys Val
  MISC_FEATURE (76)..(76): Xaa at this position is a single (one, 1) amino acid selected from the following options: Glu Asp Asn Lys
  MISC_FEATURE (77)..(77): Xaa at this position is a single (one, 1) amino acid selected from the following options: Glu Val
  MISC_FEATURE (78)..(78): Xaa at this position is a single (one, 1) amino acid selected from the following options: Ile Val
  MISC_FEATURE (79)..(79): Xaa at this position is a single (one, 1) amino acid selected from the following options: Val Thr Ser Asp Asn Gly Ala Glu Gln Tyr Arg
  MISC_FEATURE (82)..(82): Xaa at this position is a single (one, 1) amino acid selected from the following options: Lys Ser Met Val His Ala Arg Gln Glu Ile Leu Val
  MISC_FEATURE (83)..(83): Xaa at this position is a single (one, 1) amino acid selected from the following options: Lys Glu Gln Arg Gly
  MISC_FEATURE (84)..(84): Xaa at this position is a single (one, 1) amino acid selected from the following options: Glu Ala Gln
  MISC_FEATURE (86)..(86): Xaa at this position is a single (one, 1) amino acid selected from the following options: Glu Lys Asp Gln
  MISC_FEATURE (87)..(87): Xaa at this position is a single (one, 1) amino acid selected from the following options: Arg His Leu Gln Cys Val Gln
  MISC_FEATURE (88)..(88): Xaa at this position is a single (one, 1) amino acid selected from the following options: Leu Met
  MISC_FEATURE (89)..(89): Xaa at this position is a single (one, 1) amino acid selected from the following options: Gln Glu Lys
  MISC_FEATURE (90)..(90): Xaa at this position is a single (one, 1) amino acid selected from the following options: Lys Asn Arg Gln
  MISC_FEATURE (91)..(91): Xaa at this position is a single (one, 1) amino acid selected from the following options: Glu Gln Asn
  MISC_FEATURE (92)..(92): Xaa at this position is a single (one, 1) amino acid selected from the following options: Ile Met
  MISC_FEATURE (93)..(93): Xaa at this position is a single (one, 1) amino acid selected from the following options: Glu Gln Asp Ile Lys
  MISC_FEATURE (94)..(94): Xaa at this position is a single (one, 1) amino acid selected from the following options: Arg Gln Lys Glu
  MISC_FEATURE (95)..(95): Xaa at this position is a single (one, 1) amino acid selected from the following options: His Leu Ile
  MISC_FEATURE (96)..(96): Xaa at this position is a single (one, 1) amino acid selected from the following options: Lys Gln Glu
  MISC_FEATURE (97)..(97): Xaa at this position is a single (one, 1) amino acid selected from the following options: Gln Lys Glu Tyr Gly Ser His Asp Asn
  MISC_FEATURE (98)..(98): Xaa at this position is a single (one, 1) amino acid selected from the following options: Lys Arg Ser Ala Asn Thr His Ser Leu
  MISC_FEATURE (99)..(99): Xaa at this position is a single (one, 1) amino acid selected from the following options: Ile Met Asp Val
  MISC_FEATURE (100)..(100): Xaa at this position is a single (one, 1) amino acid selected from the following options: Lys Gln Arg Asn
  MISC_FEATURE (101)..(101): Xaa at this position is a single (one, 1) amino acid selected from the following options: Met Thr Lys His Tyr Ser Gln Ile Val Asn Asp Arg
  MISC_FEATURE (103)..(103): Xaa at this position is a single (one, 1) amino acid selected from the following options: Lys Asn Ser His Arg Thr Gly
  MISC_FEATURE (104)..(104): Xaa at this position is a single (one, 1) amino acid selected from the following options: His Asp Asn Ser Arg Gln Glu Tyr Asn Leu Gln Gly
  MISC_FEATURE (105)..(105): Xaa at this position is a single (one, 1) amino acid selected from the following options: Asp His Ser Asn Ile or is absent (no amino acid at this position and so this position is not present)
  MISC_FEATURE (106)..(106): Xaa at this position is a single (one, 1) amino acid selected from the following options: Asp Glu His Gly Asn or is absent (no amino acid at this position and so this position is not present)
  MISC_FEATURE (107)..(107): Xaa at this position is a single (one, 1) amino acid selected from the following options: Asp His or is absent (no amino acid at this position and so this position is not present)
  MISC_FEATURE (108)..(108): Xaa at this position is a single (one, 1) amino acid selected from the following options: Asp Glu or is absent (no amino acid at this position and so this position is not present)
  MISC_FEATURE (109)..(109): Asp or is absent (no amino acid at this position and so this position is not present)
  MISC_FEATURE (110)..(110): Asp or is absent (no amino acid at this position and so this position is not present)
MAXXXXXXXXXXXXXXXXXXXXXXXXXXXXXXXXXXXXAXXXXXXXXXXXAXXXXXXXXXXXXXXXXXXXXXAKXXXXXAAXXXIXXXXXXXXXXXXXXXXLXXXXXXXX

SEQ ID NO: 119 - protein, 108 aa, Artificial Sequence
  Designed; as detailed elsewhere in present application
  MISC_FEATURE (3)..(3): Xaa at this position is a single (one, 1) amino acid selected from the following options: Val Gly Ala Thr
  MISC_FEATURE (4)..(4): Xaa at this position is a single (one, 1) amino acid selected from the following options: Thr Ser Pro
  MISC_FEATURE (5)..(5): Xaa at this position is a single (one, 1) amino acid selected from the following options: Ala Val Glu
  MISC_FEATURE (6)..(6): Xaa at this position is a single (one, 1) amino acid selected from the following options: Leu Thr Gln
  MISC_FEATURE (7)..(7): Xaa at this position is a single (one, 1) amino acid selected from the following options: Ala Val
  MISC_FEATURE (8)..(8): Xaa at this position is a single (one, 1) amino acid selected from the following options: Ala Val Leu Ile Thr
  MISC_FEATURE (9)..(9): Xaa at this position is a single (one, 1) amino acid selected from the following options: Arg Gln Trp
  MISC_FEATURE (10)..(10): Xaa at this position is a single (one, 1) amino acid selected from the following options: Thr Val Met Ala Ser Leu
  MISC_FEATURE (11)..(11): Xaa at this position is a single (one, 1) amino acid selected from the following options: Trp Arg Gln
  MISC_FEATURE (12)..(12): Xaa at this position is a single (one, 1) amino acid selected from the following options: Leu Phe Gln
  MISC_FEATURE (13)..(13): Xaa at this position is a single (one, 1) amino acid selected from the following options: Gly Tyr Cys Ala Arg
  MISC_FEATURE (14)..(14): Xaa at this position is a single (one, 1) amino acid selected from the following options: Val Ser Ala Thr Met Arg
  MISC_FEATURE (15)..(15): Xaa at this position is a single (one, 1) amino acid selected from the following options: Trp Leu
  MISC_FEATURE (16)..(16): Xaa at this position is a single (one, 1) amino acid selected from the following options: Gly Ser
  MISC_FEATURE (17)..(17): Xaa at this position is a single (one, 1) amino acid selected from the following options: Val Ala Met
  MISC_FEATURE (18)..(18): Xaa at this position is a single (one, 1) amino acid selected from the following options: Arg Trp Lys Leu
  MISC_FEATURE (19)..(19): Xaa at this position is a single (one, 1) amino acid selected from the following options: Thr Ala Val Ser
  MISC_FEATURE (20)..(20): Xaa at this position is a single (one, 1) amino acid selected from the following options: Met Leu Ile Arg Val Ala Thr
  MISC_FEATURE (21)..(21): Xaa at this position is a single (one, 1) amino acid selected from the following options: Gln Arg
  MISC_FEATURE (22)..(22): Xaa at this position is a single (one, 1) amino acid selected from the following options: Ala Thr Gly Ser
  MISC_FEATURE (23)..(23): Xaa at this position is a single (one, 1) amino acid selected from the following options: Arg Gln Gly Leu
  MISC_FEATURE (24)..(24): Xaa at this position is a single (one, 1) amino acid selected from the following options: Gly Ser
  MISC_FEATURE (25)..(25): Xaa at this position is a single (one, 1) amino acid selected from the following options: Phe Tyr
  MISC_FEATURE (26)..(26): Xaa at this position is a single (one, 1) amino acid selected from the following options: Gly Leu
  MISC_FEATURE (27)..(27): Xaa at this position is a single (one, 1) amino acid selected from the following options: Ser Gly
  MISC_FEATURE (28)..(28): Xaa at this position is a single (one, 1) amino acid selected from the following options: Glu Asp Ser
  MISC_FEATURE (29)..(29): Xaa at this position is a single (one, 1) amino acid selected from the following options: Gly Ser Gln Pro
  MISC_FEATURE (30)..(30): Xaa at this position is a single (one, 1) amino acid selected from the following options: Ala Ser
  MISC_FEATURE (31)..(31): Xaa at this position is a single (one, 1) amino acid selected from the following options: Asp Gly Glu
  MISC_FEATURE (32)..(32): Xaa at this position is a single (one, 1) amino acid selected from the following options: Asn Lys
  MISC_FEATURE (33)..(33): Xaa at this position is a single (one, 1) amino acid selected from the following options: Leu Gly Val
  MISC_FEATURE (34)..(34): Xaa at this position is a single (one, 1) amino acid selected from the following options: Gly Asp
  MISC_FEATURE (35)..(35): Xaa at this position is a single (one, 1) amino acid selected from the following options: Ser Gly Arg
  MISC_FEATURE (36)..(36): Xaa at this position is a single (one, 1) amino acid selected from the following options: Ser Gly
  MISC_FEATURE (37)..(37): Xaa at this position is a single (one, 1) amino acid selected from the following options: Ala Gly Glu
  MISC_FEATURE (38)..(38): Xaa at this position is a single (one, 1) amino acid selected from the following options: Gly Ala
  MISC_FEATURE (40)..(40): Xaa at this position is a single (one, 1) amino acid selected from the following options: Ile Val
  MISC_FEATURE (41)..(41): Xaa at this position is a single (one, 1) amino acid selected from the following options: Arg Trp
  MISC_FEATURE (42)..(42): Xaa at this position is a single (one, 1) amino acid selected from the following options: Asp Glu Asn
  MISC_FEATURE (45)..(45): Xaa at this position is a single (one, 1) amino acid selected from the following options: Gly Val
  MISC_FEATURE (46)..(46): Xaa at this position is a single (one, 1) amino acid selected from the following options: Ala Asp
  MISC_FEATURE (48)..(48): Xaa at this position is a single (one, 1) amino acid selected from the following options: Gly Arg
  MISC_FEATURE (50)..(50): Xaa at this position is a single (one, 1) amino acid selected from the following options: Lys Arg
  MISC_FEATURE (52)..(52): Xaa at this position is a single (one, 1) amino acid selected from the following options: Gln Ala
  MISC_FEATURE (54)..(54): Xaa at this position is a single (one, 1) amino acid selected from the following options: Glu His Lys
  MISC_FEATURE (55)..(55): Xaa at this position is a single (one, 1) amino acid selected from the following options: Glu Gly
  MISC_FEATURE (59)..(59): Xaa at this position is a single (one, 1) amino acid selected from the following options: Phe Leu
  MISC_FEATURE (61)..(61): Xaa at this position is a single (one, 1) amino acid selected from the following options: Ala Glu Asp
  MISC_FEATURE (62)..(62): Xaa at this position is a single (one, 1) amino acid selected from the following options: Arg Lys Gln
  MISC_FEATURE (63)..(63): Xaa at this position is a single (one, 1) amino acid selected from the following options: Ala Glu Ser
  MISC_FEATURE (64)..(64): Xaa at this position is a single (one, 1) amino acid selected from the following options: Lys Arg
  MISC_FEATURE (69)..(69): Xaa at this position is a single (one, 1) amino acid selected from the following options: Ala Ser
  MISC_FEATURE (71)..(71): Xaa at this position is a single (one, 1) amino acid selected from the following options: Lys Arg
  MISC_FEATURE (72)..(72): Xaa at this position is a single (one, 1) amino acid selected from the following options: Lys Glu
  MISC_FEATURE (76)..(76): Xaa at this position is a single (one, 1) amino acid selected from the following options: Glu Asn
  MISC_FEATURE (79)..(79): Xaa at this position is a single (one, 1) amino acid selected from the following options: Ser Asp Val
  MISC_FEATURE (82)..(82): Xaa at this position is a single (one, 1) amino acid selected from the following options: Lys Val
  MISC_FEATURE (86)..(86): Xaa at this position is a single (one, 1) amino acid selected from the following options: Glu Gln
  MISC_FEATURE (87)..(87): Xaa at this position is a single (one, 1) amino acid selected from the following options: His Arg
  MISC_FEATURE (93)..(93): Xaa at this position is a single (one, 1) amino acid selected from the following options: Glu Asp
  MISC_FEATURE (97)..(97): Xaa at this position is a single (one, 1) amino acid selected from the following options: Gln Asn
  MISC_FEATURE (98)..(98): Xaa at this position is a single (one, 1) amino acid selected from the following options: Ser Lys
  MISC_FEATURE (101)..(101): Xaa at this position is a single (one, 1) amino acid selected from the following options: Lys Met
  MISC_FEATURE (104)..(104): Xaa at this position is a single (one, 1) amino acid selected from the following options: His Gly
  MISC_FEATURE (107)..(107): Asp or is absent (no amino acid at this position and so this position is not present)
  MISC_FEATURE (108)..(108): Asp or is absent (no amino acid at this position and so this position is not present)
MAXXXXXXXXXXXXXXXXXXXXXXXXXXXXXXXXXXXXAXXXAGXXFXKXAXAXXERYXRXXXXEQLAXLXXAKEXEIXAAXKEIXXLQKEIXRHKXXIKXLKXDDXX

SEQ ID NO: 120 - protein, 108 aa, Artificial Sequence
  Designed; as detailed elsewhere in present application
  MISC_FEATURE (3)..(3): Xaa at this position is a single (one, 1) amino acid selected from the following options: Val Gly Ala Thr
  MISC_FEATURE (4)..(4): Xaa at this position is a single (one, 1) amino acid selected from the following options: Thr Ser Pro
  MISC_FEATURE (5)..(5): Xaa at this position is a single (one, 1) amino acid selected from the following options: Ala Val Glu
  MISC_FEATURE (6)..(6): Xaa at this position is a single (one, 1) amino acid selected from the following options: Leu Thr Gln
  MISC_FEATURE (7)..(7): Xaa at this position is a single (one, 1) amino acid selected from the following options: Ala Val
  MISC_FEATURE (8)..(8): Xaa at this position is a single (one, 1) amino acid selected from the following options: Ala Val Leu Ile Thr
  MISC_FEATURE (9)..(9): Xaa at this position is a single (one, 1) amino acid selected from the following options: Arg Gln Trp
  MISC_FEATURE (10)..(10): Xaa at this position is a single (one, 1) amino acid selected from the following options: Thr Val Met Ala Ser Leu
  MISC_FEATURE (11)..(11): Xaa at this position is a single (one, 1) amino acid selected from the following options: Trp Arg Gln
  MISC_FEATURE (12)..(12): Xaa at this position is a single (one, 1) amino acid selected from the following options: Leu Phe Gln
  MISC_FEATURE (13)..(13): Xaa at this position is a single (one, 1) amino acid selected from the following options: Gly Tyr Cys Ala Arg
  MISC_FEATURE (14)..(14): Xaa at this position is a single (one, 1) amino acid selected from the following options: Val Ser Ala Thr Met Arg
  MISC_FEATURE (15)..(15): Xaa at this position is a single (one, 1) amino acid selected from the following options: Trp Leu
  MISC_FEATURE (16)..(16): Xaa at this position is a single (one, 1) amino acid selected from the following options: Gly Ser
  MISC_FEATURE (17)..(17): Xaa at this position is a single (one, 1) amino acid selected from the following options: Val Ala Met
  MISC_FEATURE (18)..(18): Xaa at this position is a single (one, 1) amino acid selected from the following options: Arg Trp Lys Leu
  MISC_FEATURE (19)..(19): Xaa at this position is a single (one, 1) amino acid selected from the following options: Thr Ala Val Ser
  MISC_FEATURE (20)..(20): Xaa at this position is a single (one, 1) amino acid selected from the following options: Met Leu Ile Arg Val Ala Thr
  MISC_FEATURE (21)..(21): Xaa at this position is a single (one, 1) amino acid selected from the following options: Gln Arg
  MISC_FEATURE (22)..(22): Xaa at this position is a single (one, 1) amino acid selected from the following options: Ala Thr Gly Ser
  MISC_FEATURE (23)..(23): Xaa at this position is a single (one, 1) amino acid selected from the following options: Arg Gln Gly Leu
  MISC_FEATURE (24)..(24): Xaa at this position is a single (one, 1) amino acid selected from the following options: Gly Ser
  MISC_FEATURE (25)..(25): Xaa at this position is a single (one, 1) amino acid selected from the following options: Phe Tyr
  MISC_FEATURE (26)..(26): Xaa at this position is a single (one, 1) amino acid selected from the following options: Gly Leu
  MISC_FEATURE (27)..(27): Xaa at this position is a single (one, 1) amino acid selected from the following options: Ser Gly
  MISC_FEATURE (28)..(28): Xaa at this position is a single (one, 1) amino acid selected from the following options: Glu Asp
  MISC_FEATURE (29)..(29): Xaa at this position is a single (one, 1) amino acid selected from the following options: Gly Ser
  MISC_FEATURE (30)..(30): Xaa at this position is a single (one, 1) amino acid selected from the following options: Ala Ser
  MISC_FEATURE (31)..(31): Xaa at this position is a single (one, 1) amino acid selected from the following options: Asp Gly
  MISC_FEATURE (32)..(32): Xaa at this position is a single (one, 1) amino acid selected from the following options: Asn Lys
  MISC_FEATURE (33)..(33): Xaa at this position is a single (one, 1) amino acid selected from the following options: Leu Gly
  MISC_FEATURE (34)..(34): Xaa at this position is a single (one, 1) amino acid selected from the following options: Gly Asp
  MISC_FEATURE (35)..(35): Xaa at this position is a single (one, 1) amino acid selected from the following options: Ser Gly
  MISC_FEATURE (36)..(36): Xaa at this position is a single (one, 1) amino acid selected from the following options: Ser Gly
  MISC_FEATURE (37)..(37): Xaa at this position is a single (one, 1) amino acid selected from the following options: Ala Gly
  MISC_FEATURE (38)..(38): Xaa at this position is a single (one, 1) amino acid selected from the following options: Gly Ala
  MISC_FEATURE (40)..(40): Xaa at this position is a single (one, 1) amino acid selected from the following options: Ile Val
  MISC_FEATURE (41)..(41): Xaa at this position is a single (one, 1) amino acid selected from the following options: Arg Trp
  MISC_FEATURE (42)..(42): Xaa at this position is a single (one, 1) amino acid selected from the following options: Asp Glu
  MISC_FEATURE (50)..(50): Xaa at this position is a single (one, 1) amino acid selected from the following options: Lys Arg
  MISC_FEATURE (52)..(52): Xaa at this position is a single (one, 1) amino acid selected from the following options: Gln Ala
  MISC_FEATURE (54)..(54): Xaa at this position is a single (one, 1) amino acid selected from the following options: Glu His
  MISC_FEATURE (59)..(59): Xaa at this position is a single (one, 1) amino acid selected from the following options: Phe Leu
  MISC_FEATURE (61)..(61): Xaa at this position is a single (one, 1) amino acid selected from the following options: Ala Glu
  MISC_FEATURE (62)..(62): Xaa at this position is a single (one, 1) amino acid selected from the following options: Arg Lys
  MISC_FEATURE (63)..(63): Xaa at this position is a single (one, 1) amino acid selected from the following options: Ala Glu
  MISC_FEATURE (64)..(64): Xaa at this position is a single (one, 1) amino acid selected from the following options: Lys Arg
  MISC_FEATURE (69)..(69): Xaa at this position is a single (one, 1) amino acid selected from the following options: Ala Ser
  MISC_FEATURE (71)..(71): Xaa at this position is a single (one, 1) amino acid selected from the following options: Lys Arg
  MISC_FEATURE (72)..(72): Xaa at this position is a single (one, 1) amino acid selected from the following options: Lys Glu
  MISC_FEATURE (76)..(76): Xaa at this position is a single (one, 1) amino acid selected from the following options: Glu Asn
  MISC_FEATURE (79)..(79): Xaa at this position is a single (one, 1) amino acid selected from the following options: Ser Asp
  MISC_FEATURE (82)..(82): Xaa at this position is a single (one, 1) amino acid selected from the following options: Lys Val
  MISC_FEATURE (86)..(86): Xaa at this position is a single (one, 1) amino acid selected from the following options: Glu Gln
  MISC_FEATURE (87)..(87): Xaa at this position is a single (one, 1) amino acid selected from the following options: His Arg
  MISC_FEATURE (93)..(93): Xaa at this position is a single (one, 1) amino acid selected from the following options: Glu Asp
  MISC_FEATURE (97)..(97): Xaa at this position is a single (one, 1) amino acid selected from the following options: Gln Asn
  MISC_FEATURE (98)..(98): Xaa at this position is a single (one, 1) amino acid selected from the following options: Ser Lys
  MISC_FEATURE (104)..(104): Xaa at this position is a single (one, 1) amino acid selected from the following options: His Gly
  MISC_FEATURE (108)..(108): Asp or is absent (no amino acid at this position and so this position is not present)
MAXXXXXXXXXXXXXXXXXXXXXXXXXXXXXXXXXXXXAXXXAGGAFGKXAXAXEERYXRXXXXEQLAXLXXAKEXEIXAAXKEIXXLQKEIXRHKXXIKKLKXDDDX

SEQ ID NO: 121 - protein, 108 aa, Artificial Sequence
  Designed; as detailed elsewhere in present application
  MISC_FEATURE (26)..(26): Xaa at this position is a single (one, 1) amino acid selected from the following options: Gly Leu
  MISC_FEATURE (27)..(27): Xaa at this position is a single (one, 1) amino acid selected from the following options: Ser Gly
  MISC_FEATURE (28)..(28): Xaa at this position is a single (one, 1) amino acid selected from the following options: Glu Asp
  MISC_FEATURE (29)..(29): Xaa at this position is a single (one, 1) amino acid selected from the following options: Gly Ser
  MISC_FEATURE (30)..(30): Xaa at this position is a single (one, 1) amino acid selected from the following options: Ala Ser
  MISC_FEATURE (31)..(31): Xaa at this position is a single (one, 1) amino acid selected from the following options: Asp Gly
  MISC_FEATURE (32)..(32): Xaa at this position is a single (one, 1) amino acid selected from the following options: Asn Lys
  MISC_FEATURE (33)..(33): Xaa at this position is a single (one, 1) amino acid selected from the following options: Leu Gly
  MISC_FEATURE (34)..(34): Xaa at this position is a single (one, 1) amino acid selected from the following options: Gly Asp
  MISC_FEATURE (35)..(35): Xaa at this position is a single (one, 1) amino acid selected from the following options: Ser Gly
  MISC_FEATURE (36)..(36): Xaa at this position is a single (one, 1) amino acid selected from the following options: Ser Gly
  MISC_FEATURE (37)..(37): Xaa at this position is a single (one, 1) amino acid selected from the following options: Ala Gly
  MISC_FEATURE (38)..(38): Xaa at this position is a single (one, 1) amino acid selected from the following options: Gly Ala
  MISC_FEATURE (40)..(40): Xaa at this position is a single (one, 1) amino acid selected from the following options: Ile Val
  MISC_FEATURE (41)..(41): Xaa at this position is a single (one, 1) amino acid selected from the following options: Arg Trp
  MISC_FEATURE (42)..(42): Xaa at this position is a single (one, 1) amino acid selected from the following options: Asp Glu
  MISC_FEATURE (50)..(50): Xaa at this position is a single (one, 1) amino acid selected from the following options: Lys Arg
  MISC_FEATURE (52)..(52): Xaa at this position is a single (one, 1) amino acid selected from the following options: Gln Ala
  MISC_FEATURE (54)..(54): Xaa at this position is a single (one, 1) amino acid selected from the following options: Glu His
  MISC_FEATURE (59)..(59): Xaa at this position is a single (one, 1) amino acid selected from the following options: Phe Leu
  MISC_FEATURE (61)..(61): Xaa at this position is a single (one, 1) amino acid selected from the following options: Ala Glu
  MISC_FEATURE (62)..(62): Xaa at this position is a single (one, 1) amino acid selected from the following options: Arg Lys
  MISC_FEATURE (63)..(63): Xaa at this position is a single (one, 1) amino acid selected from the following options: Ala Glu
  MISC_FEATURE (64)..(64): Xaa at this position is a single (one, 1) amino acid selected from the following options: Lys Arg
  MISC_FEATURE (69)..(69): Xaa at this position is a single (one, 1) amino acid selected from the following options: Ala Ser
  MISC_FEATURE (71)..(71): Xaa at this position is a single (one, 1) amino acid selected from the following options: Lys Arg
  MISC_FEATURE (72)..(72): Xaa at this position is a single (one, 1) amino acid selected from the following options: Lys Glu
  MISC_FEATURE (76)..(76): Xaa at this position is a single (one, 1) amino acid selected from the following options: Glu Asn
  MISC_FEATURE (79)..(79): Xaa at this position is a single (one, 1) amino acid selected from the following options: Ser Asp
  MISC_FEATURE (82)..(82): Xaa at this position is a single (one, 1) amino acid selected from the following options: Lys Val
  MISC_FEATURE (86)..(86): Xaa at this position is a single (one, 1) amino acid selected from the following options: Glu Gln
  MISC_FEATURE (87)..(87): Xaa at this position is a single (one, 1) amino acid selected from the following options: His Arg
  MISC_FEATURE (93)..(93): Xaa at this position is a single (one, 1) amino acid selected from the following options: Glu Asp
  MISC_FEATURE (97)..(97): Xaa at this position is a single (one, 1) amino acid selected from the following options: Gln Asn
  MISC_FEATURE (98)..(98): Xaa at this position is a single (one, 1) amino acid selected from the following options: Ser Lys
  MISC_FEATURE (104)..(104): Xaa at this position is a single (one, 1) amino acid selected from the following options: His Gly
  MISC_FEATURE (108)..(108): Asp or is absent (no amino acid at this position and so this position is not present)
MAVTALAARTWLGVWGVRTMQARGFXXXXXXXXXXXXXAXXXAGGAFGKXAXAXEERYXRXXXXEQLAXLXXAKEXEIXAAXKEIXXLQKEIXRHKXXIKKLKXDDDX

SEQ ID NO: 122 - protein, 108 aa, Artificial Sequence
  Designed; as detailed elsewhere in present application
  MISC_FEATURE (26)..(26): Xaa at this position is a single (one, 1) amino acid selected from the following options: Gly Leu
  MISC_FEATURE (27)..(27): Xaa at this position is a single (one, 1) amino acid selected from the following options: Ser Gly
  MISC_FEATURE (28)..(28): Xaa at this position is a single (one, 1) amino acid selected from the following options: Glu Asp
  MISC_FEATURE (29)..(29): Xaa at this position is a single (one, 1) amino acid selected from the following options: Gly Ser
  MISC_FEATURE (30)..(30): Xaa at this position is a single (one, 1) amino acid selected from the following options: Ala Ser
  MISC_FEATURE (31)..(31): Xaa at this position is a single (one, 1) amino acid selected from the following options: Asp Gly
  MISC_FEATURE (32)..(32): Xaa at this position is a single (one, 1) amino acid selected from the following options: Asn Lys
  MISC_FEATURE (33)..(33): Xaa at this position is a single (one, 1) amino acid selected from the following options: Leu Gly
  MISC_FEATURE (34)..(34): Xaa at this position is a single (one, 1) amino acid selected from the following options: Gly Asp
  MISC_FEATURE (35)..(35): Xaa at this position is a single (one, 1) amino acid selected from the following options: Ser Gly
  MISC_FEATURE (36)..(36): Xaa at this position is a single (one, 1) amino acid selected from the following options: Ser Gly
  MISC_FEATURE (37)..(37): Xaa at this position is a single (one, 1) amino acid selected from the following options: Ala Gly
  MISC_FEATURE (38)..(38): Xaa at this position is a single (one, 1) amino acid selected from the following options: Gly Ala
  MISC_FEATURE (40)..(40): Xaa at this position is a single (one, 1) amino acid selected from the following options: Ile Val
  MISC_FEATURE (41)..(41): Xaa at this position is a single (one, 1) amino acid selected from the following options: Arg Trp
  MISC_FEATURE (42)..(42): Xaa at this position is a single (one, 1) amino acid selected from the following options: Asp Glu
  MISC_FEATURE (50)..(50): Xaa at this position is a single (one, 1) amino acid selected from the following options: Lys Arg
  MISC_FEATURE (52)..(52): Xaa at this position is a single (one, 1) amino acid selected from the following options: Gln Ala
  MISC_FEATURE (54)..(54): Xaa at this position is a single (one, 1) amino acid selected from the following options: Glu His
  MISC_FEATURE (59)..(59): Xaa at this position is a single (one, 1) amino acid selected from the following options: Phe Leu
  MISC_FEATURE (61)..(61): Xaa at this position is a single (one, 1) amino acid selected from the following options: Ala Glu
  MISC_FEATURE (62)..(62): Xaa at this position is a single (one, 1) amino acid selected from the following options: Arg Lys
  MISC_FEATURE (63)..(63): Xaa at this position is a single (one, 1) amino acid selected from the following options: Ala Glu
  MISC_FEATURE (64)..(64): Xaa at this position is a single (one, 1) amino acid selected from the following options: Lys Arg
  MISC_FEATURE (69)..(69): Xaa at this position is a single (one, 1) amino acid selected from the following options: Ala Ser
  MISC_FEATURE (71)..(71): Xaa at this position is a single (one, 1) amino acid selected from the following options: Lys Arg
  MISC_FEATURE (72)..(72): Xaa at this position is a single (one, 1) amino acid selected from the following options: Lys Glu
  MISC_FEATURE (76)..(76): Xaa at this position is a single (one, 1) amino acid selected from the following options: Glu Asn
  MISC_FEATURE (79)..(79): Xaa at this position is a single (one, 1) amino acid selected from the following options: Ser Asp
  MISC_FEATURE (82)..(82): Xaa at this position is a single (one, 1) amino acid selected from the following options: Lys Val
  MISC_FEATURE (86)..(86): Xaa at this position is a single (one, 1) amino acid selected from the following options: Glu Gln
  MISC_FEATURE (87)..(87): Xaa at this position is a single (one, 1) amino acid selected from the following options: His Arg
  MISC_FEATURE (93)..(93): Xaa at this position is a single (one, 1) amino acid selected from the following options: Glu Asp
  MISC_FEATURE (97)..(97): Xaa at this position is a single (one, 1) amino acid selected from the following options: Gln Asn
  MISC_FEATURE (98)..(98): Xaa at this position is a single (one, 1) amino acid selected from the following options: Ser Lys
  MISC_FEATURE (104)..(104): Xaa at this position is a single (one, 1) amino acid selected from the following options: His Gly
  MISC_FEATURE (108)..(108): Asp or is absent (no amino acid at this position and so this position is not present)
MAGSALAVRARFGVWGMKVLQTRGFXXXXXXXXXXXXXAXXXAGGAFGKXAXAXEERYXRXXXXEQLAXLXXAKEXEIXAAXKEIXXLQKEIXRHKXXIKKLKXDDDX

SEQ ID NO: 123 - protein, 115 aa, Artificial Sequence
  Designed; as detailed elsewhere in present application
  MISC_FEATURE (3)..(3): Xaa at this position is a single (one, 1) amino acid selected from the following options: Val Gly Ala Thr
  MISC_FEATURE (4)..(4): Xaa at this position is a single (one, 1) amino acid selected from the following options: Thr Ser Pro
  MISC_FEATURE (5)..(5): Xaa at this position is a single (one, 1) amino acid selected from the following options: Glu Ala Val
  MISC_FEATURE (6)..(6): Xaa at this position is a single (one, 1) amino acid selected from the following options: Leu Thr Gln
  MISC_FEATURE (7)..(7): Xaa at this position is a single (one, 1) amino acid selected from the following options: Ala Val
  MISC_FEATURE (8)..(8): Xaa at this position is a single (one, 1) amino acid selected from the following options: Ala Val Leu Ile Thr
  MISC_FEATURE (9)..(9): Xaa at this position is a single (one, 1) amino acid selected from the following options: Trp Arg Gln
  MISC_FEATURE (10)..(10): Xaa at this position is a single (one, 1) amino acid selected from the following options: Thr Val Met Ala Ser Leu
  MISC_FEATURE (11)..(11): Xaa at this position is a single (one, 1) amino acid selected from the following options: Gln Trp Arg
  MISC_FEATURE (12)..(12): Xaa at this position is a single (one, 1) amino acid selected from the following options: Leu Phe Gln
  MISC_FEATURE (13)..(13): Xaa at this position is a single (one, 1) amino acid selected from the following options: Arg Gly Tyr Cys Ala
  MISC_FEATURE (14)..(14): Xaa at this position is a single (one, 1) amino acid selected from the following options: Val Ser Ala Thr Met Arg
  MISC_FEATURE (15)..(15): Xaa at this position is a single (one, 1) amino acid selected from the following options: Trp Leu
  MISC_FEATURE (16)..(16): Xaa at this position is a single (one, 1) amino acid selected from the following options: Gly Ser
  MISC_FEATURE (17)..(17): Xaa at this position is a single (one, 1) amino acid selected from the following options: Val Ala Met
  MISC_FEATURE (18)..(18): Xaa at this position is a single (one, 1) amino acid selected from the following options: Arg Trp Lys Leu
  MISC_FEATURE (19)..(19): Xaa at this position is a single (one, 1) amino acid selected from the following options: Thr Ala Val Ser
  MISC_FEATURE (20)..(20): Xaa at this position is a single (one, 1) amino acid selected from the following options: Met Leu Ile Arg Val Ala Thr
  MISC_FEATURE (21)..(21): Xaa at this position is a single (one, 1) amino acid selected from the following options: Gln Arg
  MISC_FEATURE (22)..(22): Xaa at this position is a single (one, 1) amino acid selected from the following options: Ala Thr Gly Ser
  MISC_FEATURE (23)..(23): Xaa at this position is a single (one, 1) amino acid selected from the following options: Leu Arg Gln Gly
  MISC_FEATURE (24)..(24): Xaa at this position is a single (one, 1) amino acid selected from the following options: Gly Ser
  MISC_FEATURE (25)..(25): Xaa at this position is a single (one, 1) amino acid selected from the following options: Phe Tyr
  MISC_FEATURE (26)..(26): Xaa at this position is a single (one, 1) amino acid selected from the following options: Gly Ser Val Ala Thr Leu Arg Phe Ile Lys Met Gln Asn
  MISC_FEATURE (27)..(27): Xaa at this position is a single (one, 1) amino acid selected from the following options: Ser Cys Arg Gly Phe Thr Pro
  MISC_FEATURE (28)..(28): Xaa at this position is a single (one, 1) amino acid selected from the following options: Asp Glu Gly Ser Phe Lys Thr Leu Phe Pro
  MISC_FEATURE (29)..(29): Xaa at this position is a single (one, 1) amino acid selected from the following options: Pro Gln Arg Ser Thr Lys Gly Glu Ala Phe
  MISC_FEATURE (30)..(30): Xaa at this position is a single (one, 1) amino acid selected from the following options: Ser Pro Ala Gly Arg Glu Asp Val
  MISC_FEATURE (31)..(31): Xaa at this position is a single (one, 1) amino acid selected from the following options: Glu Asp Lys His Ala Gly Asn Ser Arg Gln Asp Thr Leu Val
  MISC_FEATURE (32)..(32): Xaa at this position is a single (one, 1) amino acid selected from the following options: Asn Asp Tyr Ser Gly Arg His Lys Glu Ala Leu
  MISC_FEATURE (33)..(33): Xaa at this position is a single (one, 1) amino acid selected from the following options: Val Leu Pro His Met Ile Phe Thr Gly Gly Ser Asp Glu Phe
  MISC_FEATURE (34)..(34): Xaa at this position is a single (one, 1) amino acid selected from the following options: Asp Gly His Arg Ser Glu Pro
  MISC_FEATURE (35)..(35): Xaa at this position is a single (one, 1) amino acid selected from the following options: Arg Ser Gly Thr Pro Ala Lys Glu
  MISC_FEATURE (36)..(36): Xaa at this position is a single (one, 1) amino acid selected from the following options: Arg Thr Gly Ser Arg Pro Lys Asp Ala
  MISC_FEATURE (37)..(37): Xaa at this position is a single (one, 1) amino acid selected from the following options: Ala Glu Ser Gly Arg
  MISC_FEATURE (38)..(38): Xaa at this position is a single (one, 1) amino acid selected from the following options: Ala Gly Gln Pro
  MISC_FEATURE (40)..(40): Xaa at this position is a single (one, 1) amino acid selected from the following options: Ile Val Leu Glu Phe
  MISC_FEATURE (41)..(41): Xaa at this position is a single (one, 1) amino acid selected from the following options: Trp Arg Lys Glu Thr Tyr
  MISC_FEATURE (42)..(42): Xaa at this position is a single (one, 1) amino acid selected from the following options: Asn Glu Asp Ala Lys Ser
  MISC_FEATURE (43)..(43): Xaa at this position is a single (one, 1) amino acid selected from the following options: Ala Arg Lys Cys
  MISC_FEATURE (44)..(44): Xaa at this position is a single (one, 1) amino acid selected from the following options: Gly Tyr Glu Pro
  MISC_FEATURE (45)..(45): Xaa at this position is a single (one, 1) amino acid selected from the following options: Val Gly Phe Lys Arg
  MISC_FEATURE (46)..(46): Xaa at this position is a single (one, 1) amino acid selected from the following options: Asp Ala Ser Arg Leu
  MISC_FEATURE (47)..(47): Xaa at this position is a single (one, 1) amino acid selected from the following options: Phe Leu Ile Glu Ser
  MISC_FEATURE (48)..(48): Xaa at this position is a single (one, 1) amino acid selected from the following options: Arg Gly Ala Ile Glu Ser Pro
  MISC_FEATURE (49)..(49): Xaa at this position is a single (one, 1) amino acid selected from the following options: Lys Arg Thr Glu Gln
  MISC_FEATURE (50)..(50): Xaa at this position is a single (one, 1) amino acid selected from the following options: Arg Lys Met
  MISC_FEATURE (52)..(52): Xaa at this position is a single (one, 1) amino acid selected from the following options: Gln Ala Lys Arg Pro Phe Val
  MISC_FEATURE (53)..(53): Xaa at this position is a single (one, 1) amino acid selected from the following options: Ala Ser Arg
  MISC_FEATURE (54)..(54): Xaa at this position is a single (one, 1) amino acid selected from the following options: Lys Glu Asp His Ala Ile
  MISC_FEATURE (55)..(55): Xaa at this position is a single (one, 1) amino acid selected from the following options: Gly Glu Pro Arg
  MISC_FEATURE (56)..(56): Xaa at this position is a single (one, 1) amino acid selected from the following options: Glu Asp Tyr Thr Gln
  MISC_FEATURE (57)..(57): Xaa at this position is a single (one, 1) amino acid selected from the following options: Arg Met Lys
  MISC_FEATURE (58)..(58): Xaa at this position is a single (one, 1) amino acid selected from the following options: Tyr Phe Glu
  MISC_FEATURE (59)..(59): Xaa at this position is a single (one, 1) amino acid selected from the following options: Leu Phe Pro Gln
  MISC_FEATURE (60)..(60): Xaa at this position is a single (one, 1) amino acid selected from the following options: Arg Leu Lys
  MISC_FEATURE (61)..(61): Xaa at this position is a single (one, 1) amino acid selected from the following options: Ala Lys Glu Thr Asp Gln Arg
  MISC_FEATURE (62)..(62): Xaa at this position is a single (one, 1) amino acid selected from the following options: Gln Arg Lys Ala Cys
  MISC_FEATURE (63)..(63): Xaa at this position is a single (one, 1) amino acid selected from the following options: Ser Thr Ala Asn Glu Leu
  MISC_FEATURE (64)..(64): Xaa at this position is a single (one, 1) amino acid selected from the following options: Arg Lys Gln His Ala
  MISC_FEATURE (65)..(65): Xaa at this position is a single (one, 1) amino acid selected from the following options: Glu Gln Lys
  MISC_FEATURE (66)..(66): Xaa at this position is a single (one, 1) amino acid selected from the following options: Gln Lys
  MISC_FEATURE (67)..(67): Xaa at this position is a single (one, 1) amino acid selected from the following options: Leu His Met Glu
  MISC_FEATURE (68)..(68): Xaa at this position is a single (one, 1) amino acid selected from the following options: Ala Leu Glu Thr Asp Ser
  MISC_FEATURE (69)..(69): Xaa at this position is a single (one, 1) amino acid selected from the following options: Ala Thr Arg Ile Ser Asn Val Met Asp
  MISC_FEATURE (70)..(70): Xaa at this position is a single (one, 1) amino acid selected from the following options: Leu Glu
  MISC_FEATURE (71)..(71): Xaa at this position is a single (one, 1) amino acid selected from the following options: Lys Arg Ile
  MISC_FEATURE (72)..(72): Xaa at this position is a single (one, 1) amino acid selected from the following options: Lys Asn Arg Thr Glu
  MISC_FEATURE (75)..(75): Xaa at this position is a single (one, 1) amino acid selected from the following options: Glu Gln Lys Val
  MISC_FEATURE (76)..(76): Xaa at this position is a single (one, 1) amino acid selected from the following options: Glu Asp Asn Lys
  MISC_FEATURE (77)..(77): Xaa at this position is a single (one, 1) amino acid selected from the following options: Glu Val
  MISC_FEATURE (78)..(78): Xaa at this position is a single (one, 1) amino acid selected from the following options: Ile Val
  MISC_FEATURE (79)..(79): Xaa at this position is a single (one, 1) amino acid selected from the following options: Val Thr Ser Asp Asn Gly Ala Glu Gln Tyr Arg
  MISC_FEATURE (82)..(82): Xaa at this position is a single (one, 1) amino acid selected from the following options: Lys Ser Met Val His Ala Arg Gln Glu Ile Leu Val
  MISC_FEATURE (83)..(83): Xaa at this position is a single (one, 1) amino acid selected from the following options: Lys Glu Gln Arg Gly
  MISC_FEATURE (84)..(84): Xaa at this position is a single (one, 1) amino acid selected from the following options: Glu Ala Gln
  MISC_FEATURE (86)..(86): Xaa at this position is a single (one, 1) amino acid selected from the following options: Glu Lys Asp Gln
  MISC_FEATURE (87)..(87): Xaa at this position is a single (one, 1) amino acid selected from the following options: Arg His Leu Gln Cys Val Gln
  MISC_FEATURE (88)..(88): Xaa at this position is a single (one, 1) amino acid selected from the following options: Leu Met
  MISC_FEATURE (89)..(89): Xaa at this position is a single (one, 1) amino acid selected from the following options: Gln Glu Lys
  MISC_FEATURE (90)..(90): Xaa at this position is a single (one, 1) amino acid selected from the following options: Lys Asn Arg Gln
  MISC_FEATURE (91)..(91): Xaa at this position is a single (one, 1) amino acid selected from the following options: Glu Gln Asn
  MISC_FEATURE (92)..(92): Xaa at this position is a single (one, 1) amino acid selected from the following options: Ile Met
  MISC_FEATURE (93)..(93): Xaa at this position is a single (one, 1) amino acid selected from the following options: Glu Gln Asp Ile Lys
  MISC_FEATURE (94)..(94): Xaa at this position is a single (one, 1) amino acid selected from the following options: Arg Gln Lys Glu
  MISC_FEATURE (95)..(95): Xaa at this position is a single (one, 1) amino acid selected from the following options: His Leu Ile
  MISC_FEATURE (96)..(96): Xaa at this position is a single (one, 1) amino acid selected from the following options: Lys Gln Glu
  MISC_FEATURE (97)..(97): Xaa at this position is a single (one, 1) amino acid selected from the following options: Gln Lys Glu Tyr Gly Ser His Asp Asn
  MISC_FEATURE (98)..(98): Xaa at this position is a single (one, 1) amino acid selected from the following options: Lys Arg Ser Ala Asn Thr His Ser Leu
  MISC_FEATURE (99)..(99): Xaa at this position is a single (one, 1) amino acid selected from the following options: Ile Met Asp Val
  MISC_FEATURE (100)..(100): Xaa at this position is a single (one, 1) amino acid selected from the following options: Lys Gln Arg Asn
  MISC_FEATURE (101)..(101): Xaa at this position is a single (one, 1) amino acid selected from the following options: Met Thr Lys His Tyr Ser Gln Ile Val Asn Asp Arg
  MISC_FEATURE (103)..(103): Xaa at this position is a single (one, 1) amino acid selected from the following options: Lys Asn Ser His Arg Thr Gly
  MISC_FEATURE (104)..(104): Xaa at this position is a single (one, 1) amino acid selected from the following options: His Asp Asn Ser Arg Gln Glu Tyr Asn Leu Gln Gly
  MISC_FEATURE (105)..(105): Xaa at this position is a single (one, 1) amino acid selected from the following options: Asp His Ser Asn Ile or is absent (no amino acid at this position and so this position is not present)
  MISC_FEATURE (106)..(106): Xaa at this position is a single (one, 1) amino acid selected from the following options: Asp Glu His Gly Asn or is absent (no amino acid at this position and so this position is not present)
  MISC_FEATURE (107)..(107): Xaa at this position is a single (one, 1) amino acid selected from the following options: Asp His or is absent (no amino acid at this position and so this position is not present)
  MISC_FEATURE (108)..(108): Xaa at this position is a single (one, 1) amino acid selected from the following options: Asp Glu or is absent (no amino acid at this position and so this position is not present)
  MISC_FEATURE (109)..(109): Asp or is absent (no amino acid at this position and so this position is not present)
  MISC_FEATURE (110)..(110): Asp or is absent (no amino acid at this position and so this position is not present)
  MISC_FEATURE (111)..(111): Asp or is absent (no amino acid at this position and so this position is not present)
  MISC_FEATURE (112)..(112): Asp or is absent (no amino acid at this position and so this position is not present)
  MISC_FEATURE (113)..(113): Asp or is absent (no amino acid at this position and so this position is not present)
  MISC_FEATURE (114)..(114): Asp or is absent (no amino acid at this position and so this position is not present)
  MISC_FEATURE (115)..(115): Asp or is absent (no amino acid at this position and so this position is not present)
MAXXXXXXXXXXXXXXXXXXXXXXXXXXXXXXXXXXXXAXXXXXXXXXXXAXXXXXXXXXXXXXXXXXXXXXAKXXXXXAAXXXIXXXXXXXXXXXXXXXXLXXXXXXXXXXXXX

SEQ ID NO: 124 - protein, 22 aa, Artificial Sequence
  Designed; as detailed elsewhere in present application
  MISC_FEATURE (1)..(1): Xaa at this position is a single (one, 1) amino acid (or lack thereof) selected from the following options: Ala Val Leu Ile Gly Pro or absent (no amino acid at this position and so this position is not present)
  MISC_FEATURE (1)..(6): If adjacent residues are both cysteine, optionally they can be connected by a disulfide, instead of a peptide, bond
  MISC_FEATURE (2)..(2): Xaa at this position is a single (one, 1) amino acid (or lack thereof) selected from the following options: Cys Gly Pro or absent (no amino acid at this position and so this position is not present)
  MISC_FEATURE (3)..(3): Xaa at this position is a single (one, 1) amino acid (or lack thereof) selected from the following options: Cys Gly Pro or absent (no amino acid at this position and so this position is not present)
  MISC_FEATURE (4)..(4): Xaa at this position is a single (one, 1) amino acid (or lack thereof) selected from the following options: Ala Val Leu Ile Gly Pro Ala Val Leu Ile or absent (no amino acid at this position and so this position is not present)
  MISC_FEATURE (5)..(5): Xaa at this position is a single (one, 1) amino acid (or lack thereof) selected from the following options: Tyr Cys Gly Pro Ala Val Leu Ile or absent (no amino acid at this position and so this position is not present)
  MISC_FEATURE (6)..(6): Xaa at this position is a single (one, 1) amino acid (or lack thereof) selected from the following options: Gly Cys Pro Ala Val Leu Ile or absent (no amino acid at this position and so this position is not present)
  MISC_FEATURE (16)..(16): Xaa at this position is a single (one, 1) amino acid (or lack thereof) selected from the following options: Pro Cys Gly Ala Val Leu Ile or absent (no amino acid at this position and so this position is not present)
  MISC_FEATURE (16)..(22): If adjacent residues are both cysteine, optionally they can be connected by a disulfide, instead of a peptide, bond
  MISC_FEATURE (17)..(17): Xaa at this position is a single (one, 1) amino acid (or lack thereof) selected from the following options: Pro Cys Gly Ala Val Leu Ile or absent (no amino acid at this position and so this position is not present)
  MISC_FEATURE (18)..(18): Xaa at this position is a single (one, 1) amino acid (or lack thereof) selected from the following options: Gln Cys Gly Pro Ala Val Leu Ile or absent (no amino acid at this position and so this position is not present)
  MISC_FEATURE (19)..(19): Xaa at this position is a single (one, 1) amino acid (or lack thereof) selected from the following options: Ala Val Leu Ile Gly Pro Ala Val Leu Ile or absent (no amino acid at this position and so this position is not present)
  MISC_FEATURE (20)..(20): Xaa at this position is a single (one, 1) amino acid (or lack thereof) selected from the following options: Cys Gly Pro Ala Val Leu Ile or absent (no amino acid at this position and so this position is not present)
  MISC_FEATURE (21)..(21): Xaa at this position is a single (one, 1) amino acid (or lack thereof) selected from the following options: Cys Gly Pro Ala Val Leu Ile or absent (no amino acid at this position and so this position is not present)
  MISC_FEATURE (22)..(22): Xaa at this position is a single (one, 1) amino acid (or lack thereof) selected from the following options: Ala Val Leu Ile Gly Pro Ala Val Leu Ile or absent (no amino acid at this position and so this position is not present)
XXXXXXRKKRRQRRRXXXXXXX

SEQ ID NO: 125 - protein, 24 aa, Artificial Sequence
  Designed; as detailed elsewhere in present application
  MISC_FEATURE (1)..(1): Xaa at this position is a single (one, 1) amino acid (or lack thereof) selected from the following options: Ala Val Leu Ile Gly Pro or absent (no amino acid at this position and so this position is not present)
  MISC_FEATURE (1)..(13): If adjacent residues are both cysteine, optionally they can be connected by a disulfide, instead of a peptide, bond
  MISC_FEATURE (2)..(2): Xaa at this position is a single (one, 1) amino acid (or lack thereof) selected from the following options: Cys Gly Pro or absent (no amino acid at this position and so this position is not present)
  MISC_FEATURE (3)..(3): Xaa at this position is a single (one, 1) amino acid (or lack thereof) selected from the following options: Cys Gly Pro or absent (no amino acid at this position and so this position is not present)
  MISC_FEATURE (4)..(4): Xaa at this position is a single (one, 1) amino acid (or lack thereof) selected from the following options: Ala Val Leu Ile Gly Pro or absent (no amino acid at this position and so this position is not present)
  MISC_FEATURE (5)..(5): Xaa at this position is a single (one, 1) amino acid (or lack thereof) selected from the following options: Arg Cys Gly Pro Ala Val Leu Ile or absent (no amino acid at this position and so this position is not present)
  MISC_FEATURE (6)..(6): Xaa at this position is a single (one, 1) amino acid (or lack thereof) selected from the following options: Gln Cys Gly Pro Ala Val Leu Ile or absent (no amino acid at this position and so this position is not present)
  MISC_FEATURE (7)..(7): Xaa at this position is a single (one, 1) amino acid (or lack thereof) selected from the following options: Ile Cys Gly Pro Ala Val Leu Ile or absent (no amino acid at this position and so this position is not present)
  MISC_FEATURE (8)..(8): Xaa at this position is a single (one, 1) amino acid (or lack thereof) selected from the following options: Lys Cys Gly Pro Ala Val Leu Ile or absent (no amino acid at this position and so this position is not present)
  MISC_FEATURE (9)..(9): Xaa at this position is a single (one, 1) amino acid (or lack thereof) selected from the following options: Ile Cys Gly Pro Ala Val Leu Ile or absent (no amino acid at this position and so this position is not present)
  MISC_FEATURE (10)..(10): Xaa at this position is a single (one, 1) amino acid (or lack thereof) selected from the following options: Trp Cys Gly Pro Ala Val Leu Ile or absent (no amino acid at this position and so this position is not present)
  MISC_FEATURE (11)..(11): Xaa at this position is a single (one, 1) amino acid (or lack thereof) selected from the following options: Phe Cys Gly Pro Ala Val Leu Ile or absent (no amino acid at this position and so this position is not present)
  MISC_FEATURE (12)..(12): Xaa at this position is a single (one, 1) amino acid (or lack thereof) selected from the following options: Gln Cys Gly Pro Ala Val Leu Ile or absent (no amino acid at this position and so this position is not present)
  MISC_FEATURE (13)..(13): Xaa at this position is a single (one, 1) amino acid (or lack thereof) selected from the following options: Asn Cys Gly Pro Ala Val Leu Ile or absent (no amino acid at this position and so this position is not present)
  MISC_FEATURE (21)..(21): Xaa at this position is a single (one, 1) amino acid (or lack thereof) selected from the following options: Ala Val Leu Ile Gly Pro or absent (no amino acid at this position and so this position is not present)
  MISC_FEATURE (21)..(24): If adjacent residues are both cysteine, optionally they can be connected by a disulfide, instead of a peptide, bond
  MISC_FEATURE (22)..(22): Xaa at this position is a single (one, 1) amino acid (or lack thereof) selected from the following options: Cys Gly Pro or absent (no amino acid at this position and so this position is not present)
  MISC_FEATURE (23)..(23): Xaa at this position is a single (one, 1) amino acid (or lack thereof) selected from the following options: Cys Gly Pro or absent (no amino acid at this position and so this position is not present)
  MISC_FEATURE (24)..(24): Xaa at this position is a single (one, 1) amino acid (or lack thereof) selected from the following options: Ala Val Leu Ile Gly Pro or absent (no amino acid at this position and so this position is not present)
XXXXXXXXXXXXXRRMKWKKXXXX

SEQ ID NO: 126 - protein, 53 aa, Artificial Sequence
  Designed; as detailed elsewhere in present application
  MISC_FEATURE (1)..(1): Xaa at this position is a single (one, 1) amino acid (or lack thereof) selected from the following options: Ala Val Leu Ile Gly Pro or absent (no amino acid at this position and so this position is not present)
  MISC_FEATURE (1)..(53): If adjacent residues are both cysteine, optionally they can be connected by a disulfide, instead of a peptide, bond
  MISC_FEATURE (2)..(2): Xaa at this position is a single (one, 1) amino acid (or lack thereof) selected from the following options: Cys Gly Pro or absent (no amino acid at this position and so this position is not present)
  MISC_FEATURE (3)..(3): Xaa at this position is a single (one, 1) amino acid (or lack thereof) selected from the following options: Cys Gly Pro or absent (no amino acid at this position and so this position is not present)
  MISC_FEATURE (4)..(4): Xaa at this position is a single (one, 1) amino acid (or lack thereof) selected from the following options: Ala Val Leu Ile Gly Pro or absent (no amino acid at this position and so this position is not present)
  MISC_FEATURE (10)..(53): Xaa is a single (one, 1) amino acid (or lack thereof) INDEPENDENTLY selected for each of these positions from the following options: Arg Cys Gly Pro Ala Val Leu Ile or absent (no amino acid at this position and so this position is not present)
XXXXRRRRRXXXXXXXXXXXXXXXXXXXXXXXXXXXXXXXXXXXXXXXXXXXX

SEQ ID NO: 127 - protein, 137 aa, Artificial Sequence
  Designed; as detailed elsewhere in present application
  MISC_FEATURE (1)..(1): Xaa at this position is a single (one, 1) amino acid (or lack thereof) selected from the following options: Ala Val Leu Ile Gly Pro or absent (no amino acid at this position and so this position is not present)
  MISC_FEATURE (1)..(22): If adjacent residues are both cysteine, optionally they can be connected by a disulfide, instead of a peptide, bond
  MISC_FEATURE (2)..(2): Xaa at this position is a single (one, 1) amino acid (or lack thereof) selected from the following options: Cys Gly Pro or absent (no amino acid at this position and so this position is not present)
  MISC_FEATURE (3)..(3): Xaa at this position is a single (one, 1) amino acid (or lack thereof) selected from the following options: Cys Gly Pro or absent (no amino acid at this position and so this position is not present)
  MISC_FEATURE (4)..(4): Xaa at this position is a single (one, 1) amino acid (or lack thereof) selected from the following options: Ala Val Leu Ile Gly Pro Ala Val Leu Ile or absent (no amino acid at this position and so this position is not present)
  MISC_FEATURE (5)..(5): Xaa at this position is a single (one, 1) amino acid (or lack thereof) selected from the following options: Tyr Cys Gly Pro Ala Val Leu Ile or absent (no amino acid at this position and so this position is not present)
  MISC_FEATURE (6)..(6): Xaa at this position is a single (one, 1) amino acid (or lack thereof) selected from the following options: Gly Cys Pro Ala Val Leu Ile or absent (no amino acid at this position and so this position is not present)
  MISC_FEATURE (16)..(16): Xaa at this position is a single (one, 1) amino acid (or lack thereof) selected from the following options: Pro Cys Gly Ala Val Leu Ile or absent (no amino acid at this position and so this position is not present)
  MISC_FEATURE (17)..(17): Xaa at this position is a single (one, 1) amino acid (or lack thereof) selected from the following options: Pro Cys Gly Ala Val Leu Ile or absent (no amino acid at this position and so this position is not present)
  MISC_FEATURE (18)..(18): Xaa at this position is a single (one, 1) amino acid (or lack thereof) selected from the following options: Gln Cys Gly Pro Ala Val Leu Ile or absent (no amino acid at this position and so this position is not present)
  MISC_FEATURE (19)..(19): Xaa at this position is a single (one, 1) amino acid (or lack thereof) selected from the following options: Ala Val Leu Ile Gly Pro Ala Val Leu Ile or absent (no amino acid at this position and so this position is not present)
  MISC_FEATURE (20)..(20): Xaa at this position is a single (one, 1) amino acid (or lack thereof) selected from the following options: Cys Gly Pro Ala Val Leu Ile or absent (no amino acid at this position and so this position is not present)
  MISC_FEATURE (21)..(21): Xaa at this position is a single (one, 1) amino acid (or lack thereof) selected from the following options: Cys Gly Pro Ala Val Leu Ile or absent (no amino acid at this position and so this position is not present)
  MISC_FEATURE (22)..(22): Xaa at this position is a single (one, 1) amino acid (or lack thereof) selected from the following options: Ala Val Leu Ile Gly Pro Ala Val Leu Ile or absent (no amino acid at this position and so this position is not present)
  MISC_FEATURE (25)..(25): Xaa at this position is a single (one, 1) amino acid selected from the following options: Val Gly Ala Thr
  MISC_FEATURE (26)..(26): Xaa at this position is a single (one, 1) amino acid selected from the following options: Thr Ser Pro
  MISC_FEATURE (27)..(27): Xaa at this position is a single (one, 1) amino acid selected from the following options: Glu Ala Val
  MISC_FEATURE (28)..(28): Xaa at this position is a single (one, 1) amino acid selected from the following options: Leu Thr Gln
  MISC_FEATURE (29)..(29): Xaa at this position is a single (one, 1) amino acid selected from the following options: Ala Val
  MISC_FEATURE (30)..(30): Xaa at this position is a single (one, 1) amino acid selected from the following options: Ala Val Leu Ile Thr
  MISC_FEATURE (31)..(31): Xaa at this position is a single (one, 1) amino acid selected from the following options: Trp Arg Gln
  MISC_FEATURE (32)..(32): Xaa at this position is a single (one, 1) amino acid selected from the following options: Thr Val Met Ala Ser Leu
  MISC_FEATURE (33)..(33): Xaa at this position is a single (one, 1) amino acid selected from the following options: Gln Trp Arg
  MISC_FEATURE (34)..(34): Xaa at this position is a single (one, 1) amino acid selected from the following options: Leu Phe Gln
  MISC_FEATURE (35)..(35): Xaa at this position is a single (one, 1) amino acid selected from the following options: Arg Gly Tyr Cys Ala
  MISC_FEATURE (36)..(36): Xaa at this position is a single (one, 1) amino acid selected from the following options: Val Ser Ala Thr Met Arg
  MISC_FEATURE (37)..(37): Xaa at this position is a single (one, 1) amino acid selected from the following options: Trp Leu
  MISC_FEATURE (38)..(38): Xaa at this position is a single (one, 1) amino acid selected from the following options: Gly Ser
  MISC_FEATURE (39)..(39): Xaa at this position is a single (one, 1) amino acid selected from the following options: Val Ala Met
  MISC_FEATURE (40)..(40): Xaa at this position is a single (one, 1) amino acid selected from the following options: Arg Trp Lys Leu
  MISC_FEATURE (41)..(41): Xaa at this position is a single (one, 1) amino acid selected from the following options: Thr Ala Val Ser
  MISC_FEATURE (42)..(42): Xaa at this position is a single (one, 1) amino acid selected from the following options: Met Leu Ile Arg Val Ala Thr
  MISC_FEATURE (43)..(43): Xaa at this position is a single (one, 1) amino acid selected from the following options: Gln Arg
  MISC_FEATURE (44)..(44): Xaa at this position is a single (one, 1) amino acid selected from the following options: Ala Thr Gly Ser
  MISC_FEATURE (45)..(45): Xaa at this position is a single (one, 1) amino acid selected from the following options: Leu Arg Gln Gly
  MISC_FEATURE (46)..(46): Xaa at this position is a single (one, 1) amino acid selected from the following options: Gly Ser
  MISC_FEATURE (47)..(47): Xaa at this position is a single (one, 1) amino acid selected from the following options: Phe Tyr
  MISC_FEATURE (48)..(48): Xaa at this position is a single (one, 1) amino acid selected from the following options: Gly Ser Val Ala Thr Leu Arg Phe Ile Lys Met Gln Asn
  MISC_FEATURE (49)..(49): Xaa at this position is a single (one, 1) amino acid selected from the following options: Ser Cys Arg Gly Phe Thr Pro
  MISC_FEATURE (50)..(50): Xaa at this position is a single (one, 1) amino acid selected from the following options: Asp Glu Gly Ser Phe Lys Thr Leu Phe Pro
  MISC_FEATURE (51)..(51): Xaa at this position is a single (one, 1) amino acid selected from the following options: Pro Gln Arg Ser Thr Lys Gly Glu Ala Phe
  MISC_FEATURE (52)..(52): Xaa at this position is a single (one, 1) amino acid selected from the following options: Ser Pro Ala Gly Arg Glu Asp Val
  MISC_FEATURE (53)..(53): Xaa at this position is a single (one, 1) amino acid selected from the following options: Glu Asp Lys His Ala Gly Asn Ser Arg Gln Asp Thr Leu Val
  MISC_FEATURE (54)..(54): Xaa at this position is a single (one, 1) amino acid selected from the following options: Asn Asp Tyr Ser Gly Arg His Lys Glu Ala Leu
  MISC_FEATURE (55)..(55): Xaa at this position is a single (one, 1) amino acid selected from the following options: Val Leu Pro His Met Ile Phe Thr Gly Gly Ser Asp Glu Phe
  MISC_FEATURE (56)..(56): Xaa at this position is a single (one, 1) amino acid selected from the following options: Asp Gly His Arg Ser Glu Pro
  MISC_FEATURE (57)..(57): Xaa at this position is a single (one, 1) amino acid selected from the following options: Arg Ser Gly Thr Pro Ala Lys Glu
  MISC_FEATURE (58)..(58): Xaa at this position is a single (one, 1) amino acid selected from the following options: Arg Thr Gly Ser Arg Pro Lys Asp Ala
  MISC_FEATURE (59)..(59): Xaa at this position is a single (one, 1) amino acid selected from the following options: Ala Glu Ser Gly Arg
  MISC_FEATURE (60)..(60): Xaa at this position is a single (one, 1) amino acid selected from the following options: Ala Gly Gln Pro
  MISC_FEATURE (61)..(61): Xaa at this position is a single (one, 1) amino acid selected from the following options: Gly Pro Ala Val Leu Ile Met Cys Phe Tyr Trp His Lys Arg Gln Asn Glu Asp Ser Thr
  MISC_FEATURE (62)..(62): Xaa at this position is a single (one, 1) amino acid selected from the following options: Ile Val Leu Glu Phe
  MISC_FEATURE (63)..(63): Xaa at this position is a single (one, 1) amino acid selected from the following options: Trp Arg Lys Glu Thr Tyr
  MISC_FEATURE (64)..(64): Xaa at this position is a single (one, 1) amino acid selected from the following options: Asn Glu Asp Ala Lys Ser
  MISC_FEATURE (65)..(65): Xaa at this position is a single (one, 1) amino acid selected from the following options: Ala Arg Lys Cys
  MISC_FEATURE (66)..(66): Xaa at this position is a single (one, 1) amino acid selected from the following options: Gly Tyr Glu Pro
  MISC_FEATURE (67)..(67): Xaa at this position is a single (one, 1) amino acid selected from the following options: Val Gly Phe Lys Arg
  MISC_FEATURE (68)..(68): Xaa at this position is a single (one, 1) amino acid selected from the following options: Asp Ala Ser Arg Leu
  MISC_FEATURE (69)..(69): Xaa at this position is a single (one, 1) amino acid selected from the following options: Phe Leu Ile Glu Ser
  MISC_FEATURE (70)..(70): Xaa at this position is a single (one, 1) amino acid selected from the following options: Arg Gly Ala Ile Glu Ser Pro
  MISC_FEATURE (71)..(71): Xaa at this position is a single (one, 1) amino acid selected from the following options: Lys Arg Thr Glu Gln
  MISC_FEATURE (72)..(72): Xaa at this position is a single (one, 1) amino acid selected from the following options: Arg Lys Met
  MISC_FEATURE (73)..(73): Xaa at this position is a single (one, 1) amino acid selected from the following options: Gly Pro Ala Val Leu Ile Met Cys Phe Tyr Trp His Lys Arg Gln Asn Glu Asp Ser Thr
  MISC_FEATURE (74)..(74): Xaa at this position is a single (one, 1) amino acid selected from the following options: Gln Ala Lys Arg Pro Phe Val
  MISC_FEATURE (75)..(75): Xaa at this position is a single (one, 1) amino acid selected from the following options: Ala Ser Arg
  MISC_FEATURE (76)..(76): Xaa at this position is a single (one, 1) amino acid selected from the following options: Lys Glu Asp His Ala Ile
  MISC_FEATURE (77)..(77): Xaa at this position is a single (one, 1) amino acid selected from the following options: Gly Glu Pro Arg
  MISC_FEATURE (78)..(78): Xaa at this position is a single (one, 1) amino acid selected from the following options: Glu Asp Tyr Thr Gln
  MISC_FEATURE (79)..(79): Xaa at this position is a single (one, 1) amino acid selected from the following options: Arg Met Lys
  MISC_FEATURE (80)..(80): Xaa at this position is a single (one, 1) amino acid selected from the following options: Tyr Phe Glu
  MISC_FEATURE (81)..(81): Xaa at this position is a single (one, 1) amino acid selected from the following options: Leu Phe Pro Gln
  MISC_FEATURE (82)..(82): Xaa at this position is a single (one, 1) amino acid selected from the following options: Arg Leu Lys
  MISC_FEATURE (83)..(83): Xaa at this position is a single (one, 1) amino acid selected from the following options: Ala Lys Glu Thr Asp Gln Arg
  MISC_FEATURE (84)..(84): Xaa at this position is a single (one, 1) amino acid selected from the following options: Gln Arg Lys Ala Cys
  MISC_FEATURE (85)..(85): Xaa at this position is a single (one, 1) amino acid selected from the following options: Ser Thr Ala Asn Glu Leu
  MISC_FEATURE (86)..(86): Xaa at this position is a single (one, 1) amino acid selected from the following options: Arg Lys Gln His Ala
  MISC_FEATURE (87)..(87): Xaa at this position is a single (one, 1) amino acid selected from the following options: Glu Gln Lys
  MISC_FEATURE (88)..(88): Xaa at this position is a single (one, 1) amino acid selected from the following options: Gln Lys
  MISC_FEATURE (89)..(89): Xaa at this position is a single (one, 1) amino acid selected from the following options: Leu His Met Glu
  MISC_FEATURE (90)..(90): Xaa at this position is a single (one, 1) amino acid selected from the following options: Ala Leu Glu Thr Asp Ser
  MISC_FEATURE (91)..(91): Xaa at this position is a single (one, 1) amino acid selected from the following options: Ala Thr Arg Ile Ser Asn Val Met Asp
  MISC_FEATURE (92)..(92): Xaa at this position is a single (one, 1) amino acid selected from the following options: Leu Glu
  MISC_FEATURE (93)..(93): Xaa at this position is a single (one, 1) amino acid selected from the following options: Lys Arg Ile
  MISC_FEATURE (94)..(94): Xaa at this position is a single (one, 1) amino acid selected from the following options: Lys Asn Arg Thr Glu
  MISC_FEATURE (95)..(95): Xaa at this position is a single (one, 1) amino acid selected from the following options: Gly Pro Ala Val Leu Ile Met Cys Phe Tyr Trp His Lys Arg Gln Asn Glu Asp Ser Thr
  MISC_FEATURE (96)..(96): Xaa at this position is a single (one, 1) amino acid selected from the following options: Gly Pro Ala Val Leu Ile Met Cys Phe Tyr Trp His Lys Arg Gln Asn Glu Asp Ser Thr
  MISC_FEATURE (97)..(97): Xaa at this position is a single (one, 1) amino acid selected from the following options: Glu Gln Lys Val
  MISC_FEATURE (98)..(98): Xaa at this position is a single (one, 1) amino acid selected from the following options: Glu Asp Asn Lys
  MISC_FEATURE (99)..(99): Xaa at this position is a single (one, 1) amino acid selected from the following options: Glu Val
  MISC_FEATURE (100)..(100): Xaa at this position is a single (one, 1) amino acid selected from the following options: Ile Val
  MISC_FEATURE (101)..(101): Xaa at this position is a single (one, 1) amino acid selected from the following options: Val Thr Ser Asp Asn Gly Ala Glu Gln Tyr Arg
  MISC_FEATURE (102)..(102): Xaa at this position is a single (one, 1) amino acid selected from the following options: Gly Pro Ala Val Leu Ile Met Cys Phe Tyr Trp His Lys Arg Gln Asn Glu Asp Ser Thr
  MISC_FEATURE (103)..(103): Xaa at this position is a single (one, 1) amino acid selected from the following options: Gly Pro Ala Val Leu Ile Met Cys Phe Tyr Trp His Lys Arg Gln Asn Glu Asp Ser Thr
  MISC_FEATURE (104)..(104): Xaa at this position is a single (one, 1) amino acid selected from the following options: Lys Ser Met Val His Ala Arg Gln Glu Ile Leu Val
  MISC_FEATURE (105)..(105): Xaa at this position is a single (one, 1) amino acid selected from the following options: Lys Glu Gln Arg Gly
  MISC_FEATURE (106)..(106): Xaa at this position is a single (one, 1) amino acid selected from the following options: Glu Ala Gln
  MISC_FEATURE (108)..(108): Xaa at this position is a single (one, 1) amino acid selected from the following options: Glu Lys Asp Gln
  MISC_FEATURE (109)..(109): Xaa at this position is a single (one, 1) amino acid selected from the following options: Arg His Leu Gln Cys Val Gln
  MISC_FEATURE (110)..(110): Xaa at this position is a single (one, 1) amino acid selected from the following options: Leu Met
  MISC_FEATURE (111)..(111): Xaa at this position is a single (one, 1) amino acid selected from the following options: Gln Glu Lys
  MISC_FEATURE (112)..(112): Xaa at this position is a single (one, 1) amino acid selected from the following options: Lys Asn Arg Gln
  MISC_FEATURE (113)..(113): Xaa at this position is a single (one, 1) amino acid selected from the following options: Glu Gln Asn
  MISC_FEATURE (114)..(114): Xaa at this position is a single (one, 1) amino acid selected from the following options: Ile Met
  MISC_FEATURE (115)..(115): Xaa at this position is a single (one, 1) amino acid selected from the following options: Glu Gln Asp Ile Lys
  MISC_FEATURE (116)..(116): Xaa at this position is a single (one, 1) amino acid selected from the following options: Arg Gln Lys Glu
  MISC_FEATURE (117)..(117): Xaa at this position is a single (one, 1) amino acid selected from the following options: His Leu Ile
  MISC_FEATURE (118)..(118): Xaa at this position is a single (one, 1) amino acid selected from the following options: Lys Gln Glu
  MISC_FEATURE (119)..(119): Xaa at this position is a single (one, 1) amino acid selected from the following options: Gln Lys Glu Tyr Gly Ser His Asp Asn
  MISC_FEATURE (120)..(120): Xaa at this position is a single (one, 1) amino acid selected from the following options: Lys Arg Ser Ala Asn Thr His Ser Leu
  MISC_FEATURE (121)..(121): Xaa at this position is a single (one, 1) amino acid selected from the following options: Ile Met Asp Val
  MISC_FEATURE (122)..(122): Xaa at this position is a single (one, 1) amino acid selected from the following options: Lys Gln Arg Asn
  MISC_FEATURE (123)..(123): Xaa at this position is a single (one, 1) amino acid selected from the following options: Met Thr Lys His Tyr Ser Gln Ile Val Asn Asp Arg
  MISC_FEATURE (125)..(125): Xaa at this position is a single (one, 1) amino acid selected from the following options: Lys Asn Ser His Arg Thr Gly
  MISC_FEATURE (126)..(126): Xaa at this position is a single (one, 1) amino acid selected from the following options: His Asp Asn Ser Arg Gln Glu Tyr Asn Leu Gln Gly
  MISC_FEATURE (127)..(127): Xaa at this position is a single (one, 1) amino acid (or lack thereof) selected from the following options: Asp His Ser Asn Ile or is absent (no amino acid at this position and so this position is not present)
  MISC_FEATURE (128)..(128): Xaa at this position is a single (one, 1) amino acid (or lack thereof) selected from the following options: Asp Glu His Gly Asn or is absent (no amino acid at this position and so this position is not present)
  MISC_FEATURE (129)..(129): Xaa at this position is a single (one, 1) amino acid (or lack thereof) selected from the following options: Asp His or is absent (no amino acid at this position and so this position is not present)
  MISC_FEATURE (130)..(130): Xaa at this position is a single (one, 1) amino acid (or lack thereof) selected from the following options: Asp Glu or is absent (no amino acid at this position and so this position is not present)
  MISC_FEATURE (131)..(131): Asp or is absent (no amino acid at this position and so this position is not present)
  MISC_FEATURE (132)..(132): Asp or is absent (no amino acid at this position and so this position is not present)
  MISC_FEATURE (133)..(133): Asp or is absent (no amino acid at this position and so this position is not present)
  MISC_FEATURE (134)..(134): Asp or is absent (no amino acid at this position and so this position is not present)
  MISC_FEATURE (135)..(135): Asp or is absent (no amino acid at this position and so this position is not present)
  MISC_FEATURE (136)..(136): Asp or is absent (no amino acid at this position and so this position is not present)
  MISC_FEATURE (137)..(137): Asp or is absent (no amino acid at this position and so this position is not present)
XXXXXXRKKRRQRRRXXXXXXXMAXXXXXXXXXXXXXXXXXXXXXXXXXXXXXXXXXXXXXXXXXXXXXXXXXXXXXXXXXXXXXXXXXXXXXXXXXXXXXXXXXXIXXXXXXXXXXXXXXXXLXXXXXXXXXXXXX

SEQ ID NO: 128 - protein, 139 aa, Artificial Sequence
  Designed; as detailed elsewhere in present application
  MISC_FEATURE (1)..(1): Xaa at this position is a single (one, 1) amino acid (or lack thereof) selected from the following options: Ala Val Leu Ile Gly Pro or absent (no amino acid at this position and so this position is not present)
  MISC_FEATURE (1)..(24): If adjacent residues are both cysteine, optionally they can be connected by a disulfide, instead of a peptide, bond
  MISC_FEATURE (2)..(2): Xaa at this position is a single (one, 1) amino acid (or lack thereof) selected from the following options: Cys Gly Pro or absent (no amino acid at this position and so this position is not present)
  MISC_FEATURE (3)..(3): Xaa at this position is a single (one, 1) amino acid (or lack thereof) selected from the following options: Cys Gly Pro or absent (no amino acid at this position and so this position is not present)
  MISC_FEATURE (4)..(4): Xaa at this position is a single (one, 1) amino acid (or lack thereof) selected from the following options: Ala Val Leu Ile Gly Pro or absent (no amino acid at this position and so this position is not present)
  MISC_FEATURE (5)..(5): Xaa at this position is a single (one, 1) amino acid (or lack thereof) selected from the following options: Arg Cys Gly Pro Ala Val Leu Ile or absent (no amino acid at this position and so this position is not present)
  MISC_FEATURE (6)..(6): Xaa at this position is a single (one, 1) amino acid (or lack thereof) selected from the following options: Gln Cys Gly Pro Ala Val Leu Ile or absent (no amino acid at this position and so this position is not present)
  MISC_FEATURE (7)..(7): Xaa at this position is a single (one, 1) amino acid (or lack thereof) selected from the following options: Ile Cys Gly Pro Ala Val Leu Ile or absent (no amino acid at this position and so this position is not present)
  MISC_FEATURE (8)..(8): Xaa at this position is a single (one, 1) amino acid (or lack thereof) selected from the following options: Lys Cys Gly Pro Ala Val Leu Ile or absent (no amino acid at this position and so this position is not present)
  MISC_FEATURE (9)..(9): Xaa at this position is a single (one, 1) amino acid (or lack thereof) selected from the following options: Ile Cys Gly Pro Ala Val Leu Ile or absent (no amino acid at this position and so this position is not present)
  MISC_FEATURE (10)..(10): Xaa at this position is a single (one, 1) amino acid (or lack thereof) selected from the following options: Trp Cys Gly Pro Ala Val Leu Ile or absent (no amino acid at this position and so this position is not present)
  MISC_FEATURE (11)..(11): Xaa at this position is a single (one, 1) amino acid (or lack thereof) selected from the following options: Phe Cys Gly Pro Ala Val Leu Ile or absent (no amino acid at this position and so this position is not present)
  MISC_FEATURE (12)..(12): Xaa at this position is a single (one, 1) amino acid (or lack thereof) selected from the following options: Gln Cys Gly Pro Ala Val Leu Ile or absent (no amino acid at this position and so this position is not present)
  MISC_FEATURE (13)..(13): Xaa at this position is a single (one, 1) amino acid (or lack thereof) selected from the following options: Asn Cys Gly Pro Ala Val Leu Ile or absent (no amino acid at this position and so this position is not present)
  MISC_FEATURE (21)..(21): Xaa at this position is a single (one, 1) amino acid (or lack thereof) selected from the following options: Ala Val Leu Ile Gly Pro or absent (no amino acid at this position and so this position is not present)
  MISC_FEATURE (22)..(22): Xaa at this position is a single (one, 1) amino acid (or lack thereof) selected from the following options: Cys Gly Pro or absent (no amino acid at this position and so this position is not present)
  MISC_FEATURE (23)..(23): Xaa at this position is a single (one, 1) amino acid (or lack thereof) selected from the following options: Cys Gly Pro or absent (no amino acid at this position and so this position is not present)
  MISC_FEATURE (24)..(24): Xaa at this position is a single (one, 1) amino acid (or lack thereof) selected from the following options: Ala Val Leu Ile Gly Pro or absent (no amino acid at this position and so this position is not present)
  MISC_FEATURE (27)..(27): Xaa at this position is a single (one, 1) amino acid selected from the following options: Val Gly Ala Thr
  MISC_FEATURE (28)..(28): Xaa at this position is a single (one, 1) amino acid selected from the following options: Thr Ser Pro
  MISC_FEATURE (29)..(29): Xaa at this position is a single (one, 1) amino acid selected from the following options: Glu Ala Val
  MISC_FEATURE (30)..(30): Xaa at this position is a single (one, 1) amino acid selected from the following options: Leu Thr Gln
  MISC_FEATURE (31)..(31): Xaa at this position is a single (one, 1) amino acid selected from the following options: Ala Val
  MISC_FEATURE (32)..(32): Xaa at this position is a single (one, 1) amino acid selected from the following options: Ala Val Leu Ile Thr
  MISC_FEATURE (33)..(33): Xaa at this position is a single (one, 1) amino acid selected from the following options: Trp Arg Gln
  MISC_FEATURE (34)..(34): Xaa at this position is a single (one, 1) amino acid selected from the following options: Thr Val Met Ala Ser Leu
  MISC_FEATURE (35)..(35): Xaa at this position is a single (one, 1) amino acid selected from the following options: Gln Trp Arg
  MISC_FEATURE (36)..(36): Xaa at this position is a single (one, 1) amino acid selected from the following options: Leu Phe Gln
  MISC_FEATURE (37)..(37): Xaa at this position is a single (one, 1) amino acid selected from the following options: Arg Gly Tyr Cys Ala
  MISC_FEATURE (38)..(38): Xaa at this position is a single (one, 1) amino acid selected from the following options: Val Ser Ala Thr Met Arg
  MISC_FEATURE (39)..(39): Xaa at this position is a single (one, 1) amino acid selected from the following options: Trp Leu
  MISC_FEATURE (40)..(40): Xaa at this position is a single (one, 1) amino acid selected from the following options: Gly Ser
  MISC_FEATURE (41)..(41): Xaa at this position is a single (one, 1) amino acid selected from the following options: Val Ala Met
  MISC_FEATURE (42)..(42): Xaa at this position is a single (one, 1) amino acid selected from the following options: Arg Trp Lys Leu
  MISC_FEATURE (43)..(43): Xaa at this position is a single (one, 1) amino acid selected from the following options: Thr Ala Val Ser
  MISC_FEATURE (44)..(44): Xaa at this position is a single (one, 1) amino acid selected from the following options: Met Leu Ile Arg Val Ala Thr
  MISC_FEATURE (45)..(45): Xaa at this position is a single (one, 1) amino acid selected from the following options: Gln Arg
  MISC_FEATURE (46)..(46): Xaa at this position is a single (one, 1) amino acid selected from the following options: Ala Thr Gly Ser
  MISC_FEATURE (47)..(47): Xaa at this position is a single (one, 1) amino acid selected from the following options: Leu Arg Gln Gly
  MISC_FEATURE (48)..(48): Xaa at this position is a single (one, 1) amino acid selected from the following options: Gly Ser
  MISC_FEATURE (49)..(49): Xaa at this position is a single (one, 1) amino acid selected from the following options: Phe Tyr
  MISC_FEATURE (50)..(50): Xaa at this position is a single (one, 1) amino acid selected from the following options: Gly Ser Val Ala Thr Leu Arg Phe Ile Lys Met Gln Asn
  MISC_FEATURE (51)..(51): Xaa at this position is a single (one, 1) amino acid selected from the following options: Ser Cys Arg Gly Phe Thr Pro
  MISC_FEATURE (52)..(52): Xaa at this position is a single (one, 1) amino acid selected from the following options: Asp Glu Gly Ser Phe Lys Thr Leu Phe Pro
  MISC_FEATURE (53)..(53): Xaa at this position is a single (one, 1) amino acid selected from the following options: Pro Gln Arg Ser Thr Lys Gly Glu Ala Phe
  MISC_FEATURE (54)..(54): Xaa at this position is a single (one, 1) amino acid selected from the following options: Ser Pro Ala Gly Arg Glu Asp Val
  MISC_FEATURE (55)..(55): Xaa at this position is a single (one, 1) amino acid selected from the following options: Glu Asp Lys His Ala Gly Asn Ser Arg Gln Asp Thr Leu Val
  MISC_FEATURE (56)..(56): Xaa at this position is a single (one, 1) amino acid selected from the following options: Asn Asp Tyr Ser Gly Arg His Lys Glu Ala Leu
  MISC_FEATURE (57)..(57): Xaa at this position is a single (one, 1) amino acid selected from the following options: Val Leu Pro His Met Ile Phe Thr Gly Gly Ser Asp Glu Phe
  MISC_FEATURE (58)..(58): Xaa at this position is a single (one, 1) amino acid selected from the following options: Asp Gly His Arg Ser Glu Pro
  MISC_FEATURE (59)..(59): Xaa at this position is a single (one, 1) amino acid selected from the following options: Arg Ser Gly Thr Pro Ala Lys Glu
  MISC_FEATURE (60)..(60): Xaa at this position is a single (one, 1) amino acid selected from the following options: Arg Thr Gly Ser Arg Pro Lys Asp Ala
  MISC_FEATURE (61)..(61): Xaa at this position is a single (one, 1) amino acid selected from the following options: Ala Glu Ser Gly Arg
  MISC_FEATURE (62)..(62): Xaa at this position is a single (one, 1) amino acid selected from the following options: Ala Gly Gln Pro
  MISC_FEATURE (63)..(63): Xaa at this position is a single (one, 1) amino acid selected from the following options: Gly Pro Ala Val Leu Ile Met Cys Phe Tyr Trp His Lys Arg Gln Asn Glu Asp Ser Thr
  MISC_FEATURE (64)..(64): Xaa at this position is a single (one, 1) amino acid selected from the following options: Ile Val Leu Glu Phe
  MISC_FEATURE (65)..(65): Xaa at this position is a single (one, 1) amino acid selected from the following options: Trp Arg Lys Glu Thr Tyr
  MISC_FEATURE (66)..(66): Xaa at this position is a single (one, 1) amino acid selected from the following options: Asn Glu Asp Ala Lys Ser
  MISC_FEATURE (67)..(67): Xaa at this position is a single (one, 1) amino acid selected from the following options: Ala Arg Lys Cys
  MISC_FEATURE (68)..(68): Xaa at this position is a single (one, 1) amino acid selected from the following options: Gly Tyr Glu Pro
  MISC_FEATURE (69)..(69): Xaa at this position is a single (one, 1) amino acid selected from the following options: Val Gly Phe Lys Arg
  MISC_FEATURE (70)..(70): Xaa at this position is a single (one, 1) amino acid selected from the following options: Asp Ala Ser Arg Leu
  MISC_FEATURE (71)..(71): Xaa at this position is a single (one, 1) amino acid selected from the following options: Phe Leu Ile Glu Ser
  MISC_FEATURE (72)..(72): Xaa at this position is a single (one, 1) amino acid selected from the following options: Arg Gly Ala Ile Glu Ser Pro
  MISC_FEATURE (73)..(73): Xaa at this position is a single (one, 1) amino acid selected from the following options: Lys Arg Thr Glu Gln
  MISC_FEATURE (74)..(74): Xaa at this position is a single (one, 1) amino acid selected from the following options: Arg Lys Met
  MISC_FEATURE (75)..(75): Xaa at this position is a single (one, 1) amino acid selected from the following options: Gly Pro Ala Val Leu Ile Met Cys Phe Tyr Trp His Lys Arg Gln Asn Glu Asp Ser Thr
  MISC_FEATURE (76)..(76): Xaa at this position is a single (one, 1) amino acid selected from the following options: Gln Ala Lys Arg Pro Phe Val
  MISC_FEATURE (77)..(77): Xaa at this position is a single (one, 1) amino acid selected from the following options: Ala Ser Arg
  MISC_FEATURE (78)..(78): Xaa at this position is a single (one, 1) amino acid selected from the following options: Lys Glu Asp His Ala Ile
  MISC_FEATURE (79)..(79): Xaa at this position is a single (one, 1) amino acid selected from the following options: Gly Glu Pro Arg
  MISC_FEATURE (80)..(80): Xaa at this position is a single (one, 1) amino acid selected from the following options: Glu Asp Tyr Thr Gln
  MISC_FEATURE (81)..(81): Xaa at this position is a single (one, 1) amino acid selected from the following options: Arg Met Lys
  MISC_FEATURE (82)..(82): Xaa at this position is a single (one, 1) amino acid selected from the following options: Tyr Phe Glu
  MISC_FEATURE (83)..(83): Xaa at this position is a single (one, 1) amino acid selected from the following options: Leu Phe Pro Gln
  MISC_FEATURE (84)..(84): Xaa at this position is a single (one, 1) amino acid selected from the following options: Arg Leu Lys
  MISC_FEATURE (85)..(85): Xaa at this position is a single (one, 1) amino acid selected from the following options: Ala Lys Glu Thr Asp Gln Arg
  MISC_FEATURE (86)..(86): Xaa at this position is a single (one, 1) amino acid selected from the following options: Gln Arg Lys Ala Cys
  MISC_FEATURE (87)..(87): Xaa at this position is a single (one, 1) amino acid selected from the following options: Ser Thr Ala Asn Glu Leu
  MISC_FEATURE (88)..(88): Xaa at this position is a single (one, 1) amino acid selected from the following options: Arg Lys Gln His Ala
  MISC_FEATURE (89)..(89): Xaa at this position is a single (one, 1) amino acid selected from the following options: Glu Gln Lys
  MISC_FEATURE (90)..(90): Xaa at this position is a single (one, 1) amino acid selected from the following options: Gln Lys
  MISC_FEATURE (91)..(91): Xaa at this position is a single (one, 1) amino acid selected from the following options: Leu His Met Glu
  MISC_FEATURE (92)..(92): Xaa at this position is a single (one, 1) amino acid selected from the following options: Ala Leu Glu Thr Asp Ser
  MISC_FEATURE (93)..(93): Xaa at this position is a single (one, 1) amino acid selected from the following options: Ala Thr Arg Ile Ser Asn Val Met Asp
  MISC_FEATURE (94)..(94): Xaa at this position is a single (one, 1) amino acid selected from the following options: Leu Glu
  MISC_FEATURE (95)..(95): Xaa at this position is a single (one, 1) amino acid selected from the following options: Lys Arg Ile
  MISC_FEATURE (96)..(96): Xaa at this position is a single (one, 1) amino acid selected from the following options: Lys Asn Arg Thr Glu
  MISC_FEATURE (97)..(97): Xaa at this position is a single (one, 1) amino acid selected from the following options: Gly Pro Ala Val Leu Ile Met Cys Phe Tyr Trp His Lys Arg Gln Asn Glu Asp Ser Thr
  MISC_FEATURE (98)..(98): Xaa at this position is a single (one, 1) amino acid selected from the following options: Gly Pro Ala Val Leu Ile Met Cys Phe Tyr Trp His Lys Arg Gln Asn Glu Asp Ser Thr
  MISC_FEATURE (99)..(99): Xaa at this position is a single (one, 1) amino acid selected from the following options: Glu Gln Lys Val
  MISC_FEATURE (100)..(100): Xaa at this position is a single (one, 1) amino acid selected from the following options: Glu Asp Asn Lys
  MISC_FEATURE (101)..(101): Xaa at this position is a single (one, 1) amino acid selected from the following options: Glu Val
  MISC_FEATURE (102)..(102): Xaa at this position is a single (one, 1) amino acid selected from the following options: Ile Val
  MISC_FEATURE (103)..(103): Xaa at this position is a single (one, 1) amino acid selected from the following options: Val Thr Ser Asp Asn Gly Ala Glu Gln Tyr Arg
  MISC_FEATURE (104)..(104): Xaa at this position is a single (one, 1) amino acid selected from the following options: Gly Pro Ala Val Leu Ile Met Cys Phe Tyr Trp His Lys Arg Gln Asn Glu Asp Ser Thr
  MISC_FEATURE (105)..(105): Xaa at this position is a single (one, 1) amino acid selected from the following options: Gly Pro Ala Val Leu Ile Met Cys Phe Tyr Trp His Lys Arg Gln Asn Glu Asp Ser Thr
  MISC_FEATURE (106)..(106): Xaa at this position is a single (one, 1) amino acid selected from the following options: Lys Ser Met Val His Ala Arg Gln Glu Ile Leu Val
  MISC_FEATURE (107)..(107): Xaa at this position is a single (one, 1) amino acid selected from the following options: Lys Glu Gln Arg Gly
  MISC_FEATURE (108)..(108): Xaa at this position is a single (one, 1) amino acid selected from the following options: Glu Ala Gln
  MISC_FEATURE (110)..(110): Xaa at this position is a single (one, 1) amino acid selected from the following options: Glu Lys Asp Gln
  MISC_FEATURE (111)..(111): Xaa at this position is a single (one, 1) amino acid selected from the following options: Arg His Leu Gln Cys Val Gln
  MISC_FEATURE (112)..(112): Xaa at this position is a single (one, 1) amino acid selected from the following options: Leu Met
  MISC_FEATURE (113)..(113): Xaa at this position is a single (one, 1) amino acid selected from the following options: Gln Glu Lys
  MISC_FEATURE (114)..(114): Xaa at this position is a single (one, 1) amino acid selected from the following options: Lys Asn Arg Gln
  MISC_FEATURE (115)..(115): Xaa at this position is a single (one, 1) amino acid selected from the following options: Glu Gln Asn
  MISC_FEATURE (116)..(116): Xaa at this position is a single (one, 1) amino acid selected from the following options: Ile Met
  MISC_FEATURE (117)..(117): Xaa at this position is a single (one, 1) amino acid selected from the following options: Glu Gln Asp Ile Lys
  MISC_FEATURE (118)..(118): Xaa at this position is a single (one, 1) amino acid selected from the following options: Arg Gln Lys Glu
  MISC_FEATURE (119)..(119): Xaa at this position is a single (one, 1) amino acid selected from the following options: His Leu Ile
  MISC_FEATURE (120)..(120): Xaa at this position is a single (one, 1) amino acid selected from the following options: Lys Gln Glu
  MISC_FEATURE (121)..(121): Xaa at this position is a single (one, 1) amino acid selected from the following options: Gln Lys Glu Tyr Gly Ser His Asp Asn
  MISC_FEATURE (122)..(122): Xaa at this position is a single (one, 1) amino acid selected from the following options: Lys Arg Ser Ala Asn Thr His Ser Leu
  MISC_FEATURE (123)..(123): Xaa at this position is a single (one, 1) amino acid selected from the following options: Ile Met Asp Val
  MISC_FEATURE (124)..(124): Xaa at this position is a single (one, 1) amino acid selected from the following options: Lys Gln Arg Asn
  MISC_FEATURE (125)..(125): Xaa at this position is a single (one, 1) amino acid selected from the following options: Met Thr Lys His Tyr Ser Gln Ile Val Asn Asp Arg
  MISC_FEATURE (127)..(127): Xaa at this position is a single (one, 1) amino acid selected from the following options: Lys Asn Ser His Arg Thr Gly
  MISC_FEATURE (128)..(128): Xaa at this position is a single (one, 1) amino acid selected from the following options: His Asp Asn Ser Arg Gln Glu Tyr Asn Leu Gln Gly
  MISC_FEATURE (129)..(129): Xaa at this position is a single (one, 1) amino acid (or lack thereof) selected from the following options: Asp His Ser Asn Ile or is absent (no amino acid at this position and so this position is not present)
  MISC_FEATURE (130)..(130): Xaa at this position is a single (one, 1) amino acid (or lack thereof) selected from the following options: Asp Glu His Gly Asn or is absent (no amino acid at this position and so this position is not present)
  MISC_FEATURE (131)..(131): Xaa at this position is a single (one, 1) amino acid (or lack thereof) selected from the following options: Asp His or is absent (no amino acid at this position and so this position is not present)
  MISC_FEATURE (132)..(132): Xaa at this position is a single (one, 1) amino acid (or lack thereof) selected from the following options: Asp Glu or is absent (no amino acid at this position and so this position is not present)
  MISC_FEATURE (133)..(133): Asp or is absent (no amino acid at this position and so this position is not present)
  MISC_FEATURE (134)..(134): Asp or is absent (no amino acid at this position and so this position is not present)
  MISC_FEATURE (135)..(135): Asp or is absent (no amino acid at this position and so this position is not present)
  MISC_FEATURE (136)..(136): Asp or is absent (no amino acid at this position and so this position is not present)
  MISC_FEATURE (137)..(137): Asp or is absent (no amino acid at this position and so this position is not present)
  MISC_FEATURE (138)..(138): Asp or is absent (no amino acid at this position and so this position is not present)
  MISC_FEATURE (139)..(139): Asp or is absent (no amino acid at this position and so this position is not present)
XXXXXXXXXXXXXRRMKWKKXXXXMAXXXXXXXXXXXXXXXXXXXXXXXXXXXXXXXXXXXXXXXXXXXXXXXXXXXXXXXXXXXXXXXXXXXXXXXXXXXXXXXXXXIXXXXXXXXXXXXXXXXLXXXXXXXXXXXXX

SEQ ID NO: 129 - protein, 168 aa, Artificial Sequence
  Designed; as detailed elsewhere in present application
  MISC_FEATURE (1)..(1): Xaa at this position is a single (one, 1) amino acid (or lack thereof) selected from the following options: Ala Val Leu Ile Gly Pro or absent (no amino acid at this position and so this position is not present)
  MISC_FEATURE (1)..(53): If adjacent residues are both cysteine, optionally they can be connected by a disulfide, instead of a peptide, bond
  MISC_FEATURE (2)..(2): Xaa at this position is a single (one, 1) amino acid (or lack thereof) selected from the following options: Cys Gly Pro or absent (no amino acid at this position and so this position is not present)
  MISC_FEATURE (3)..(3): Xaa at this position is a single (one, 1) amino acid (or lack thereof) selected from the following options: Cys Gly Pro or absent (no amino acid at this position and so this position is not present)
  MISC_FEATURE (4)..(4): Xaa at this position is a single (one, 1) amino acid (or lack thereof) selected from the following options: Ala Val Leu Ile Gly Pro or absent (no amino acid at this position and so this position is not present)
  MISC_FEATURE (10)..(53): Xaa is a single (one, 1) amino acid (or lack thereof) INDEPENDENTLY selected for each of these positions from the following options: Arg Cys Gly Pro Ala Val Leu Ile or absent (no amino acid at this position and so this position is not present)
  MISC_FEATURE (56)..(56): Xaa at this position is a single (one, 1) amino acid selected from the following options: Val Gly Ala Thr
  MISC_FEATURE (57)..(57): Xaa at this position is a single (one, 1) amino acid selected from the following options: Thr Ser Pro
  MISC_FEATURE (58)..(58): Xaa at this position is a single (one, 1) amino acid selected from the following options: Glu Ala Val
  MISC_FEATURE (59)..(59): Xaa at this position is a single (one, 1) amino acid selected from the following options: Leu Thr Gln
  MISC_FEATURE (60)..(60): Xaa at this position is a single (one, 1) amino acid selected from the following options: Ala Val
  MISC_FEATURE (61)..(61): Xaa at this position is a single (one, 1) amino acid selected from the following options: Ala Val Leu Ile Thr
  MISC_FEATURE (62)..(62): Xaa at this position is a single (one, 1) amino acid selected from the following options: Trp Arg Gln
  MISC_FEATURE (63)..(63): Xaa at this position is a single (one, 1) amino acid selected from the following options: Thr Val Met Ala Ser Leu
  MISC_FEATURE (64)..(64): Xaa at this position is a single (one, 1) amino acid selected from the following options: Gln Trp Arg
  MISC_FEATURE (65)..(65): Xaa at this position is a single (one, 1) amino acid selected from the following options: Leu Phe Gln
  MISC_FEATURE (66)..(66): Xaa at this position is a single (one, 1) amino acid selected from the following options: Arg Gly Tyr Cys Ala
  MISC_FEATURE (67)..(67): Xaa at this position is a single (one, 1) amino acid selected from the following options: Val Ser Ala Thr Met Arg
  MISC_FEATURE (68)..(68): Xaa at this position is a single (one, 1) amino acid selected from the following options: Trp Leu
  MISC_FEATURE (69)..(69): Xaa at this position is a single (one, 1) amino acid selected from the following options: Gly Ser
  MISC_FEATURE (70)..(70): Xaa at this position is a single (one, 1) amino acid selected from the following options: Val Ala Met
  MISC_FEATURE (71)..(71): Xaa at this position is a single (one, 1) amino acid selected from the following options: Arg Trp Lys Leu
  MISC_FEATURE (72)..(72): Xaa at this position is a single (one, 1) amino acid selected from the following options: Thr Ala Val Ser
  MISC_FEATURE (73)..(73): Xaa at this position is a single (one, 1) amino acid selected from the following options: Met Leu Ile Arg Val Ala Thr
  MISC_FEATURE (74)..(74): Xaa at this position is a single (one, 1) amino acid selected from the following options: Gln Arg
  MISC_FEATURE (75)..(75): Xaa at this position is a single (one, 1) amino acid selected from the following options: Ala Thr Gly Ser
  MISC_FEATURE (76)..(76): Xaa at this position is a single (one, 1) amino acid selected from the following options: Leu Arg Gln Gly
  MISC_FEATURE (77)..(77): Xaa at this position is a single (one, 1) amino acid selected from the following options: Gly Ser
  MISC_FEATURE (78)..(78): Xaa at this position is a single (one, 1) amino acid selected from the following options: Phe Tyr
  MISC_FEATURE (79)..(79): Xaa at this position is a single (one, 1) amino acid selected from the following options: Gly Ser Val Ala Thr Leu Arg Phe Ile Lys Met Gln Asn
  MISC_FEATURE (80)..(80): Xaa at this position is a single (one, 1) amino acid selected from the following options: Ser Cys Arg Gly Phe Thr Pro
  MISC_FEATURE (81)..(81): Xaa at this position is a single (one, 1) amino acid selected from the following options: Asp Glu Gly Ser Phe Lys Thr Leu Phe Pro
  MISC_FEATURE (82)..(82): Xaa at this position is a single (one, 1) amino acid selected from the following options: Pro Gln Arg Ser Thr Lys Gly Glu Ala Phe
  MISC_FEATURE (83)..(83): Xaa at this position is a single (one, 1) amino acid selected from the following options: Ser Pro Ala Gly Arg Glu Asp Val
  MISC_FEATURE (84)..(84): Xaa at this position is a single (one, 1) amino acid selected from the following options: Glu Asp Lys His Ala Gly Asn Ser Arg Gln Asp Thr Leu Val
  MISC_FEATURE (85)..(85): Xaa at this position is a single (one, 1) amino acid selected from the following options: Asn Asp Tyr Ser Gly Arg His Lys Glu Ala Leu
  MISC_FEATURE (86)..(86): Xaa at this position is a single (one, 1) amino acid selected from the following options: Val Leu Pro His Met Ile Phe Thr Gly Gly Ser Asp Glu Phe
  MISC_FEATURE (87)..(87): Xaa at this position is a single (one, 1) amino acid selected from the following options: Asp Gly His Arg Ser Glu Pro
  MISC_FEATURE (88)..(88): Xaa at this position is a single (one, 1) amino acid selected from the following options: Arg Ser Gly Thr Pro Ala Lys Glu
  MISC_FEATURE (89)..(89): Xaa at this position is a single (one, 1) amino acid selected from the following options: Arg Thr Gly Ser Arg Pro Lys Asp Ala
  MISC_FEATURE (90)..(90): Xaa at this position is a single (one, 1) amino acid selected from the following options: Ala Glu Ser Gly Arg
  MISC_FEATURE (91)..(91): Xaa at this position is a single (one, 1) amino acid selected from the following options: Ala Gly Gln Pro
  MISC_FEATURE (92)..(92): Xaa at this position is a single (one, 1) amino acid selected from the following options: Gly Pro Ala Val Leu Ile Met Cys Phe Tyr Trp His Lys Arg Gln Asn Glu Asp Ser Thr
  MISC_FEATURE (93)..(93): Xaa at this position is a single (one, 1) amino acid selected from the following options: Ile Val Leu Glu Phe
  MISC_FEATURE (94)..(94): Xaa at this position is a single (one, 1) amino acid selected from the following options: Trp Arg Lys Glu Thr Tyr
  MISC_FEATURE (95)..(95): Xaa at this position is a single (one, 1) amino acid selected from the following options: Asn Glu Asp Ala Lys Ser
  MISC_FEATURE (96)..(96): Xaa at this position is a single (one, 1) amino acid selected from the following options: Ala Arg Lys Cys
  MISC_FEATURE (97)..(97): Xaa at this position is a single (one, 1) amino acid selected from the following options: Gly Tyr Glu Pro
  MISC_FEATURE (98)..(98): Xaa at this position is a single (one, 1) amino acid selected from the following options: Val Gly Phe Lys Arg
  MISC_FEATURE (99)..(99): Xaa at this position is a single (one, 1) amino acid selected from the following options: Asp Ala Ser Arg Leu
  MISC_FEATURE (100)..(100): Xaa at this position is a single (one, 1) amino acid selected from the following options: Phe Leu Ile Glu Ser
  MISC_FEATURE (101)..(101): Xaa at this position is a single (one, 1) amino acid selected from the following options: Arg Gly Ala Ile Glu Ser Pro
  MISC_FEATURE (102)..(102): Xaa at this position is a single (one, 1) amino acid selected from the following options: Lys Arg Thr Glu Gln
  MISC_FEATURE (103)..(103): Xaa at this position is a single (one, 1) amino acid selected from the following options: Arg Lys Met
  MISC_FEATURE (104)..(104): Xaa at this position is a single (one, 1) amino acid selected from the following options: Gly Pro Ala Val Leu Ile Met Cys Phe Tyr Trp His Lys Arg Gln Asn Glu Asp Ser Thr
  MISC_FEATURE (105)..(105): Xaa at this position is a single (one, 1) amino acid selected from the following options: Gln Ala Lys Arg Pro Phe Val
  MISC_FEATURE (106)..(106): Xaa at this position is a single (one, 1) amino acid selected from the following options: Ala Ser Arg
  MISC_FEATURE (107)..(107): Xaa at this position is a single (one, 1) amino acid selected from the following options: Lys Glu Asp His Ala Ile
  MISC_FEATURE (108)..(108): Xaa at this position is a single (one, 1) amino acid selected from the following options: Gly Glu Pro Arg
  MISC_FEATURE (109)..(109): Xaa at this position is a single (one, 1) amino acid selected from the following options: Glu Asp Tyr Thr Gln
  MISC_FEATURE (110)..(110): Xaa at this position is a single (one, 1) amino acid selected from the following options: Arg Met Lys
  MISC_FEATURE (111)..(111): Xaa at this position is a single (one, 1) amino acid selected from the following options: Tyr Phe Glu
  MISC_FEATURE (112)..(112): Xaa at this position is a single (one, 1) amino acid selected from the following options: Leu Phe Pro Gln
  MISC_FEATURE (113)..(113): Xaa at this position is a single (one, 1) amino acid selected from the following options: Arg Leu Lys
  MISC_FEATURE (114)..(114): Xaa at this position is a single (one, 1) amino acid selected from the following options: Ala Lys Glu Thr Asp Gln Arg
  MISC_FEATURE (115)..(115): Xaa at this position is a single (one, 1) amino acid selected from the following options: Gln Arg Lys Ala Cys
  MISC_FEATURE (116)..(116): Xaa at this position is a single (one, 1) amino acid selected from the following options: Ser Thr Ala Asn Glu Leu
  MISC_FEATURE (117)..(117): Xaa at this position is a single (one, 1) amino acid selected from the following options: Arg Lys Gln His Ala
  MISC_FEATURE (118)..(118): Xaa at this position is a single (one, 1) amino acid selected from the following options: Glu Gln Lys
  MISC_FEATURE (119)..(119): Xaa at this position is a single (one, 1) amino acid selected from the following options: Gln Lys
  MISC_FEATURE (120)..(120): Xaa at this position is a single (one, 1) amino acid selected from the following options: Leu His Met Glu
  MISC_FEATURE (121)..(121): Xaa at this position is a single (one, 1) amino acid selected from the following options: Ala Leu Glu Thr Asp Ser
  MISC_FEATURE (122)..(122): Xaa at this position is a single (one, 1) amino acid selected from the following options: Ala Thr Arg Ile Ser Asn Val Met Asp
  MISC_FEATURE (123)..(123): Xaa at this position is a single (one, 1) amino acid selected from the following options: Leu Glu
  MISC_FEATURE (124)..(124): Xaa at this position is a single (one, 1) amino acid selected from the following options: Lys Arg Ile
  MISC_FEATURE (125)..(125): Xaa at this position is a single (one, 1) amino acid selected from the following options: Lys Asn Arg Thr Glu
  MISC_FEATURE (126)..(126): Xaa at this position is a single (one, 1) amino acid selected from the following options: Gly Pro Ala Val Leu Ile Met Cys Phe Tyr Trp His Lys Arg Gln Asn Glu Asp Ser Thr
  MISC_FEATURE (127)..(127): Xaa at this position is a single (one, 1) amino acid selected from the following options: Gly Pro Ala Val Leu Ile Met Cys Phe Tyr Trp His Lys Arg Gln Asn Glu Asp Ser Thr
  MISC_FEATURE (128)..(128): Xaa at this position is a single (one, 1) amino acid selected from the following options: Glu Gln Lys Val
  MISC_FEATURE (129)..(129): Xaa at this position is a single (one, 1) amino acid selected from the following options: Glu Asp Asn Lys
  MISC_FEATURE (130)..(130): Xaa at this position is a single (one, 1) amino acid selected from the following options: Glu Val
  MISC_FEATURE (131)..(131): Xaa at this position is a single (one, 1) amino acid selected from the following options: Ile Val
  MISC_FEATURE (132)..(132): Xaa at this position is a single (one, 1) amino acid selected from the following options: Val Thr Ser Asp Asn Gly Ala Glu Gln Tyr Arg
  MISC_FEATURE (133)..(133): Xaa at this position is a single (one, 1) amino acid selected from the following options: Gly Pro Ala Val Leu Ile Met Cys Phe Tyr Trp His Lys Arg Gln Asn Glu Asp Ser Thr
  MISC_FEATURE (134)..(134): Xaa at this position is a single (one, 1) amino acid selected from the following options: Gly Pro Ala Val Leu Ile Met Cys Phe Tyr Trp His Lys Arg Gln Asn Glu Asp Ser Thr
  MISC_FEATURE (135)..(135): Xaa at this position is a single (one, 1) amino acid selected from the following options: Lys Ser Met Val His Ala Arg Gln Glu Ile Leu Val
  MISC_FEATURE (136)..(136): Xaa at this position is a single (one, 1) amino acid selected from the following options: Lys Glu Gln Arg Gly
  MISC_FEATURE (137)..(137): Xaa at this position is a single (one, 1) amino acid selected from the following options: Glu Ala Gln
  MISC_FEATURE (139)..(139): Xaa at this position is a single (one, 1) amino acid selected from the following options: Glu Lys Asp Gln
  MISC_FEATURE (140)..(140): Xaa at this position is a single (one, 1) amino acid selected from the following options: Arg His Leu Gln Cys Val Gln
  MISC_FEATURE (141)..(141): Xaa at this position is a single (one, 1) amino acid selected from the following options: Leu Met
  MISC_FEATURE (142)..(142): Xaa at this position is a single (one, 1) amino acid selected from the following options: Gln Glu Lys
  MISC_FEATURE (143)..(143): Xaa at this position is a single (one, 1) amino acid selected from the following options: Lys Asn Arg Gln
  MISC_FEATURE (144)..(144): Xaa at this position is a single (one, 1) amino acid selected from the following options: Glu Gln Asn
  MISC_FEATURE (145)..(145): Xaa at this position is a single (one, 1) amino acid selected from the following options: Ile Met
  MISC_FEATURE (146)..(146): Xaa at this position is a single (one, 1) amino acid selected from the following options: Glu Gln Asp Ile Lys
  MISC_FEATURE (147)..(147): Xaa at this position is a single (one, 1) amino acid selected from the following options: Arg Gln Lys Glu
  MISC_FEATURE (148)..(148): Xaa at this position is a single (one, 1) amino acid selected from the following options: His Leu Ile
  MISC_FEATURE (149)..(149): Xaa at this position is a single (one, 1) amino acid selected from the following options: Lys Gln Glu
  MISC_FEATURE (150)..(150): Xaa at this position is a single (one, 1) amino acid selected from the following options: Gln Lys Glu Tyr Gly Ser His Asp Asn
  MISC_FEATURE (151)..(151): Xaa at this position is a single (one, 1) amino acid selected from the following options: Lys Arg Ser Ala Asn Thr His Ser Leu
  MISC_FEATURE (152)..(152): Xaa at this position is a single (one, 1) amino acid selected from the following options: Ile Met Asp Val
  MISC_FEATURE (153)..(153): Xaa at this position is a single (one, 1) amino acid selected from the following options: Lys Gln Arg Asn
  MISC_FEATURE (154)..(154): Xaa at this position is a single (one, 1) amino acid selected from the following options: Met Thr Lys His Tyr Ser Gln Ile Val Asn Asp Arg
  MISC_FEATURE (156)..(156): Xaa at this position is a single (one, 1) amino acid selected from the following options: Lys Asn Ser His Arg Thr Gly
  MISC_FEATURE (157)..(157): Xaa at this position is a single (one, 1) amino acid selected from the following options: His Asp Asn Ser Arg Gln Glu Tyr Asn Leu Gln Gly
  MISC_FEATURE (158)..(158): Xaa at this position is a single (one, 1) (or lack thereof) amino acid selected from the following options: Asp His Ser Asn Ile or is absent (no amino acid at this position and so this position is not present)
  MISC_FEATURE (159)..(159): Xaa at this position is a single (one, 1) (or lack thereof) amino acid selected from the following options: Asp Glu His Gly Asn or is absent (no amino acid at this position and so this position is not present)
  MISC_FEATURE (160)..(160): Xaa at this position is a single (one, 1) (or lack thereof) amino acid selected from the following options: Asp His or is absent (no amino acid at this position and so this position is not present)
  MISC_FEATURE (161)..(161): Xaa at this position is a single (one, 1) (or lack thereof) amino acid selected from the following options: Asp Glu or is absent (no amino acid at this position and so this position is not present)
  MISC_FEATURE (162)..(162): Asp or is absent (no amino acid at this position and so this position is not present)
  MISC_FEATURE (163)..(163): Asp or is absent (no amino acid at this position and so this position is not present)
  MISC_FEATURE (164)..(164): Asp or is absent (no amino acid at this position and so this position is not present)
  MISC_FEATURE (165)..(165): Asp or is absent (no amino acid at this position and so this position is not present)
  MISC_FEATURE (166)..(166): Asp or is absent (no amino acid at this position and so this position is not present)
  MISC_FEATURE (167)..(167): Asp or is absent (no amino acid at this position and so this position is not present)
  MISC_FEATURE (168)..(168): Asp or is absent (no amino acid at this position and so this position is not present)
XXXXRRRRRXXXXXXXXXXXXXXXXXXXXXXXXXXXXXXXXXXXXXXXXXXXXMAXXXXXXXXXXXXXXXXXXXXXXXXXXXXXXXXXXXXXXXXXXXXXXXXXXXXXXXXXXXXXXXXXXXXXXXXXXXXXXXXXXIXXXXXXXXXXXXXXXXLXXXXXXXXXXXXX

SEQ ID NO: 130 - protein, 14 aa, Artificial Sequence
  Epitope/affinity tag
HHHHHHDYKDDDDK

SEQ ID NO: 131 - protein, 6 aa, Artificial Sequence
  Epitope/affinity tag
HHHHHH

SEQ ID NO: 132 - protein, 8 aa, Artificial Sequence
  Epitope/affinity tag
DYKDDDDK

SEQ ID NO: 133 - protein, 8 aa, Artificial Sequence
  Epitope/affinity tag
DLYDDDDK

SEQ ID NO: 134 - protein, 14 aa, Artificial Sequence
  Epitope/affinity tag
HHHHHHDLYDDDDK

SEQ ID NO: 135 - protein, 7 aa, Artificial Sequence
  Epitope/affinity tag
DYDDDDK

SEQ ID NO: 136 - protein, 13 aa, Artificial Sequence
  Epitope/affinity tag
HHHHHHDYDDDDK

SEQ ID NO: 137 - protein, 6 aa, Artificial Sequence
  Epitope/affinity tag
DTYRYI

SEQ ID NO: 138 - protein, 6 aa, Artificial Sequence
  Epitope/affinity tag
TDFYLK

SEQ ID NO: 139 - protein, 10 aa, Artificial Sequence
  Epitope/affinity tag
EQKLISEEDL

SEQ ID NO: 140 - protein, 9 aa, Artificial Sequence
  Epitope/affinity tag
EEEEYMPME

SEQ ID NO: 141 - protein, 9 aa, Artificial Sequence
  Epitope/affinity tag
YPYDVPDYA

SEQ ID NO: 142 - protein, 5 aa, Artificial Sequence
  Epitope/affinity tag
RYIRS

SEQ ID NO: 143 - protein, 6 aa, Artificial Sequence
  Epitope/affinity tag
PPEPET

SEQ ID NO: 144 - protein, 35 aa, Artificial Sequence
  Epitope/affinity tag
MGGSHHHHHHGMASMTGGQQMGRDLYDDDDKDPSS

SEQ ID NO: 145 - protein, 182 aa, Artificial Sequence
  Designed; as detailed elsewhere in present application
  MISC_FEATURE (15)..(15): Xaa at this position is a single (one, 1) amino acid (or lack thereof) selected from the following options: Ala Val Leu Ile Gly Pro or absent (no amino acid at this position and so this position is not present)
  MISC_FEATURE (15)..(67): If adjacent residues are both cysteine, optionally they can be connected by a disulfide, instead of a peptide, bond
  MISC_FEATURE (16)..(16): Xaa at this position is a single (one, 1) amino acid (or lack thereof) selected from the following options: Cys Gly Pro or absent (no amino acid at this position and so this position is not present)
  MISC_FEATURE (17)..(17): Xaa at this position is a single (one, 1) amino acid (or lack thereof) selected from the following options: Cys Gly Pro or absent (no amino acid at this position and so this position is not present)
  MISC_FEATURE (18)..(18): Xaa at this position is a single (one, 1) amino acid (or lack thereof) selected from the following options: Ala Val Leu Ile Gly Pro or absent (no amino acid at this position and so this position is not present)
  MISC_FEATURE (24)..(67): Xaa is a single (one, 1) amino acid (or lack thereof) INDEPENDENTLY selected for each of these positions from the following options: Arg Cys Gly Pro Ala Val Leu Ile or absent (no amino acid at this position and so this position is not present)
  MISC_FEATURE (70)..(70): Xaa at this position is a single (one, 1) amino acid selected from the following options: Val Gly Ala Thr
  MISC_FEATURE (71)..(71): Xaa at this position is a single (one, 1) amino acid selected from the following options: Thr Ser Pro
  MISC_FEATURE (72)..(72): Xaa at this position is a single (one, 1) amino acid selected from the following options: Glu Ala Val
  MISC_FEATURE (73)..(73): Xaa at this position is a single (one, 1) amino acid selected from the following options: Leu Thr Gln
  MISC_FEATURE (74)..(74): Xaa at this position is a single (one, 1) amino acid selected from the following options: Ala Val
  MISC_FEATURE (75)..(75): Xaa at this position is a single (one, 1) amino acid selected from the following options: Ala Val Leu Ile Thr
  MISC_FEATURE (76)..(76): Xaa at this position is a single (one, 1) amino acid selected from the following options: Trp Arg Gln
  MISC_FEATURE (77)..(77): Xaa at this position is a single (one, 1) amino acid selected from the following options: Thr Val Met Ala Ser Leu
  MISC_FEATURE (78)..(78): Xaa at this position is a single (one, 1) amino acid selected from the following options: Gln Trp Arg
  MISC_FEATURE (79)..(79): Xaa at this position is a single (one, 1) amino acid selected from the following options: Leu Phe Gln
  MISC_FEATURE (80)..(80): Xaa at this position is a single (one, 1) amino acid selected from the following options: Arg Gly Tyr Cys Ala
  MISC_FEATURE (81)..(81): Xaa at this position is a single (one, 1) amino acid selected from the following options: Val Ser Ala Thr Met Arg
  MISC_FEATURE (82)..(82): Xaa at this position is a single (one, 1) amino acid selected from the following options: Trp Leu
  MISC_FEATURE (83)..(83): Xaa at this position is a single (one, 1) amino acid selected from the following options: Gly Ser
  MISC_FEATURE (84)..(84): Xaa at this position is a single (one, 1) amino acid selected from the following options: Val Ala Met
  MISC_FEATURE (85)..(85): Xaa at this position is a single (one, 1) amino acid selected from the following options: Arg Trp Lys Leu
  MISC_FEATURE (86)..(86): Xaa at this position is a single (one, 1) amino acid selected from the following options: Thr Ala Val Ser
  MISC_FEATURE (87)..(87): Xaa at this position is a single (one, 1) amino acid selected from the following options: Met Leu Ile Arg Val Ala Thr
  MISC_FEATURE (88)..(88): Xaa at this position is a single (one, 1) amino acid selected from the following options: Gln Arg
  MISC_FEATURE (89)..(89): Xaa at this position is a single (one, 1) amino acid selected from the following options: Ala Thr Gly Ser
  MISC_FEATURE (90)..(90): Xaa at this position is a single (one, 1) amino acid selected from the following options: Leu Arg Gln Gly
  MISC_FEATURE (91)..(91): Xaa at this position is a single (one, 1) amino acid selected from the following options: Gly Ser
  MISC_FEATURE (92)..(92): Xaa at this position is a single (one, 1) amino acid selected from the following options: Phe Tyr
  MISC_FEATURE (93)..(93): Xaa at this position is a single (one, 1) amino acid selected from the following options: Gly Ser Val Ala Thr Leu Arg Phe Ile Lys Met Gln Asn
  MISC_FEATURE (94)..(94): Xaa at this position is a single (one, 1) amino acid selected from the following options: Ser Cys Arg Gly Phe Thr Pro
  MISC_FEATURE (95)..(95): Xaa at this position is a single (one, 1) amino acid selected from the following options: Asp Glu Gly Ser Phe Lys Thr Leu Phe Pro
  MISC_FEATURE (96)..(96): Xaa at this position is a single (one, 1) amino acid selected from the following options: Pro Gln Arg Ser Thr Lys Gly Glu Ala Phe
  MISC_FEATURE (97)..(97): Xaa at this position is a single (one, 1) amino acid selected from the following options: Ser Pro Ala Gly Arg Glu Asp Val
  MISC_FEATURE (98)..(98): Xaa at this position is a single (one, 1) amino acid selected from the following options: Glu Asp Lys His Ala Gly Asn Ser Arg Gln Asp Thr Leu Val
  MISC_FEATURE (99)..(99): Xaa at this position is a single (one, 1) amino acid selected from the following options: Asn Asp Tyr Ser Gly Arg His Lys Glu Ala Leu
  MISC_FEATURE (100)..(100): Xaa at this position is a single (one, 1) amino acid selected from the following options: Val Leu Pro His Met Ile Phe Thr Gly Gly Ser Asp Glu Phe
  MISC_FEATURE (101)..(101): Xaa at this position is a single (one, 1) amino acid selected from the following options: Asp Gly His Arg Ser Glu Pro
  MISC_FEATURE (102)..(102): Xaa at this position is a single (one, 1) amino acid selected from the following options: Arg Ser Gly Thr Pro Ala Lys Glu
  MISC_FEATURE (103)..(103): Xaa at this position is a single (one, 1) amino acid selected from the following options: Arg Thr Gly Ser Arg Pro Lys Asp Ala
  MISC_FEATURE (104)..(104): Xaa at this position is a single (one, 1) amino acid selected from the following options: Ala Glu Ser Gly Arg
  MISC_FEATURE (105)..(105): Xaa at this position is a single (one, 1) amino acid selected from the following options: Ala Gly Gln Pro
  MISC_FEATURE (107)..(107): Xaa at this position is a single (one, 1) amino acid selected from the following options: Ile Val Leu Glu Phe
  MISC_FEATURE (108)..(108): Xaa at this position is a single (one, 1) amino acid selected from the following options: Trp Arg Lys Glu Thr Tyr
  MISC_FEATURE (109)..(109): Xaa at this position is a single (one, 1) amino acid selected from the following options: Asn Glu Asp Ala Lys Ser
  MISC_FEATURE (110)..(110): Xaa at this position is a single (one, 1) amino acid selected from the following options: Ala Arg Lys Cys
  MISC_FEATURE (111)..(111): Xaa at this position is a single (one, 1) amino acid selected from the following options: Gly Tyr Glu Pro
  MISC_FEATURE (112)..(112): Xaa at this position is a single (one, 1) amino acid selected from the following options: Val Gly Phe Lys Arg
  MISC_FEATURE (113)..(113): Xaa at this position is a single (one, 1) amino acid selected from the following options: Asp Ala Ser Arg Leu
  MISC_FEATURE (114)..(114): Xaa at this position is a single (one, 1) amino acid selected from the following options: Phe Leu Ile Glu Ser
  MISC_FEATURE (115)..(115): Xaa at this position is a single (one, 1) amino acid selected from the following options: Arg Gly Ala Ile Glu Ser Pro
  MISC_FEATURE (116)..(116): Xaa at this position is a single (one, 1) amino acid selected from the following options: Lys Arg Thr Glu Gln
  MISC_FEATURE (117)..(117): Xaa at this position is a single (one, 1) amino acid selected from the following options: Arg Lys Met
  MISC_FEATURE (118)..(118): Xaa at this position is a single (one, 1) amino acid selected from the following options: Gly Pro Ala Val Leu Ile Met Cys Phe Tyr Trp His Lys Arg Gln Asn Glu Asp Ser Thr
  MISC_FEATURE (119)..(119): Xaa at this position is a single (one, 1) amino acid selected from the following options: Gln Ala Lys Arg Pro Phe Val
  MISC_FEATURE (120)..(120): Xaa at this position is a single (one, 1) amino acid selected from the following options: Ala Ser Arg
  MISC_FEATURE (121)..(121): Xaa at this position is a single (one, 1) amino acid selected from the following options: Lys Glu Asp His Ala Ile
  MISC_FEATURE (122)..(122): Xaa at this position is a single (one, 1) amino acid selected from the following options: Gly Glu Pro Arg
  MISC_FEATURE (123)..(123): Xaa at this position is a single (one, 1) amino acid selected from the following options: Glu Asp Tyr Thr Gln
  MISC_FEATURE (124)..(124): Xaa at this position is a single (one, 1) amino acid selected from the following options: Arg Met Lys
  MISC_FEATURE (125)..(125): Xaa at this position is a single (one, 1) amino acid selected from the following options: Tyr Phe Glu
  MISC_FEATURE (126)..(126): Xaa at this position is a single (one, 1) amino acid selected from the following options: Leu Phe Pro Gln
  MISC_FEATURE (127)..(127): Xaa at this position is a single (one, 1) amino acid selected from the following options: Arg Leu Lys
  MISC_FEATURE (128)..(128): Xaa at this position is a single (one, 1) amino acid selected from the following options: Ala Lys Glu Thr Asp Gln Arg
  MISC_FEATURE (129)..(129): Xaa at this position is a single (one, 1) amino acid selected from the following options: Gln Arg Lys Ala Cys
  MISC_FEATURE (130)..(130): Xaa at this position is a single (one, 1) amino acid selected from the following options: Ser Thr Ala Asn Glu Leu
  MISC_FEATURE (131)..(131): Xaa at this position is a single (one, 1) amino acid selected from the following options: Arg Lys Gln His Ala
  MISC_FEATURE (132)..(132): Xaa at this position is a single (one, 1) amino acid selected from the following options: Glu Gln Lys
  MISC_FEATURE (133)..(133): Xaa at this position is a single (one, 1) amino acid selected from the following options: Gln Lys
  MISC_FEATURE (134)..(134): Xaa at this position is a single (one, 1) amino acid selected from the following options: Leu His Met Glu
  MISC_FEATURE (135)..(135): Xaa at this position is a single (one, 1) amino acid selected from the following options: Ala Leu Glu Thr Asp Ser
  MISC_FEATURE (136)..(136): Xaa at this position is a single (one, 1) amino acid selected from the following options: Ala Thr Arg Ile Ser Asn Val Met Asp
  MISC_FEATURE (137)..(137): Xaa at this position is a single (one, 1) amino acid selected from the following options: Leu Glu
  MISC_FEATURE (138)..(138): Xaa at this position is a single (one, 1) amino acid selected from the following options: Lys Arg Ile
  MISC_FEATURE (139)..(139): Xaa at this position is a single (one, 1) amino acid selected from the following options: Lys Asn Arg Thr Glu
  MISC_FEATURE (140)..(140): Xaa at this position is a single (one, 1) amino acid selected from the following options: Gly Pro Ala Val Leu Ile Met Cys Phe Tyr Trp His Lys Arg Gln Asn Glu Asp Ser Thr
  MISC_FEATURE (142)..(142): Xaa at this position is a single (one, 1) amino acid selected from the following options: Glu Gln Lys Val
  MISC_FEATURE (143)..(143): Xaa at this position is a single (one, 1) amino acid selected from the following options: Glu Asp Asn Lys
  MISC_FEATURE (144)..(144): Xaa at this position is a single (one, 1) amino acid selected from the following options: Glu Val
  MISC_FEATURE (145)..(145): Xaa at this position is a single (one, 1) amino acid selected from the following options: Ile Val
  MISC_FEATURE (146)..(146): Xaa at this position is a single (one, 1) amino acid selected from the following options: Val Thr Ser Asp Asn Gly Ala Glu Gln Tyr Arg
  MISC_FEATURE (147)..(147): Xaa at this position is a single (one, 1) amino acid selected from the following options: Gly Pro Ala Val Leu Ile Met Cys Phe Tyr Trp His Lys Arg Gln Asn Glu Asp Ser Thr
  MISC_FEATURE (148)..(148): Xaa at this position is a single (one, 1) amino acid selected from the following options: Gly Pro Ala Val Leu Ile Met Cys Phe Tyr Trp His Lys Arg Gln Asn Glu Asp Ser Thr
  MISC_FEATURE (149)..(149): Xaa at this position is a single (one, 1) amino acid selected from the following options: Lys Ser Met Val His Ala Arg Gln Glu Ile Leu Val
  MISC_FEATURE (150)..(150): Xaa at this position is a single (one, 1) amino acid selected from the following options: Lys Glu Gln Arg Gly
  MISC_FEATURE (151)..(151): Xaa at this position is a single (one, 1) amino acid selected from the following options: Glu Ala Gln
  MISC_FEATURE (153)..(153): Xaa at this position is a single (one, 1) amino acid selected from the following options: Glu Lys Asp Gln
  MISC_FEATURE (154)..(154): Xaa at this position is a single (one, 1) amino acid selected from the following options: Arg His Leu Gln Cys Val Gln
  MISC_FEATURE (155)..(155): Xaa at this position is a single (one, 1) amino acid selected from the following options: Leu Met
  MISC_FEATURE (156)..(156): Xaa at this position is a single (one, 1) amino acid selected from the following options: Gln Glu Lys
  MISC_FEATURE (157)..(157): Xaa at this position is a single (one, 1) amino acid selected from the following options: Lys Asn Arg Gln
  MISC_FEATURE (158)..(158): Xaa at this position is a single (one, 1) amino acid selected from the following options: Glu Gln Asn
  MISC_FEATURE (159)..(159): Xaa at this position is a single (one, 1) amino acid selected from the following options: Ile Met
  MISC_FEATURE (160)..(160): Xaa at this position is a single (one, 1) amino acid selected from the following options: Glu Gln Asp Ile Lys
  MISC_FEATURE (161)..(161): Xaa at this position is a single (one, 1) amino acid selected from the following options: Arg Gln Lys Glu
  MISC_FEATURE (162)..(162): Xaa at this position is a single (one, 1) amino acid selected from the following options: His Leu Ile
  MISC_FEATURE (163)..(163): Xaa at this position is a single (one, 1) amino acid selected from the following options: Lys Gln Glu
  MISC_FEATURE (164)..(164): Xaa at this position is a single (one, 1) amino acid selected from the following options: Gln Lys Glu Tyr Gly Ser His Asp Asn
  MISC_FEATURE (165)..(165): Xaa at this position is a single (one, 1) amino acid selected from the following options: Lys Arg Ser Ala Asn Thr His Ser Leu
  MISC_FEATURE (166)..(166): Xaa at this position is a single (one, 1) amino acid selected from the following options: Ile Met Asp Val
  MISC_FEATURE (167)..(167): Xaa at this position is a single (one, 1) amino acid selected from the following options: Lys Gln Arg Asn
  MISC_FEATURE (168)..(168): Xaa at this position is a single (one, 1) amino acid selected from the following options: Met Thr Lys His Tyr Ser Gln Ile Val Asn Asp Arg
  MISC_FEATURE (170)..(170): Xaa at this position is a single (one, 1) amino acid selected from the following options: Lys Asn Ser His Arg Thr Gly
  MISC_FEATURE (171)..(171): Xaa at this position is a single (one, 1) amino acid selected from the following options: His Asp Asn Ser Arg Gln Glu Tyr Asn Leu Gln Gly
  MISC_FEATURE (172)..(172): Xaa at this position is a single (one, 1) amino acid (or lack thereof) selected from the following options: Asp His Ser Asn Ile or is absent (no amino acid at this position and so this position is not present)
  MISC_FEATURE (173)..(173): Xaa at this position is a single (one, 1) amino acid (or lack thereof) selected from the following options: Asp Glu His Gly Asn or is absent (no amino acid at this position and so this position is not present)
  MISC_FEATURE (174)..(174): Xaa at this position is a single (one, 1) amino acid (or lack thereof) selected from the following options: Asp His or is absent (no amino acid at this position and so this position is not present)
  MISC_FEATURE (175)..(175): Xaa at this position is a single (one, 1) amino acid (or lack thereof) selected from the following options: Asp Glu or is absent (no amino acid at this position and so this position is not present)
  MISC_FEATURE (176)..(176): Asp or is absent (no amino acid at this position and so this position is not present)
  MISC_FEATURE (177)..(177): Asp or is absent (no amino acid at this position and so this position is not present)
  MISC_FEATURE (178)..(178): Asp or is absent (no amino acid at this position and so this position is not present)
  MISC_FEATURE (179)..(179): Asp or is absent (no amino acid at this position and so this position is not present)
  MISC_FEATURE (180)..(180): Asp or is absent (no amino acid at this position and so this position is not present)
  MISC_FEATURE (181)..(181): Asp or is absent (no amino acid at this position and so this position is not present)
  MISC_FEATURE (182)..(182): Asp or is absent (no amino acid at this position and so this position is not present)
HHHHHHDYKDDDDKXXXXRRRRRXXXXXXXXXXXXXXXXXXXXXXXXXXXXXXXXXXXXXXXXXXXXMAXXXXXXXXXXXXXXXXXXXXXXXXXXXXXXXXXXXXAXXXXXXXXXXXXXXXXXXXXXXXXXXXXXXXXXXKXXXXXXXXXXIXXXXXXXXXXXXXXXXLXXXXXXXXXXXXX

SEQ ID NO: 146 - protein, 121 aa, Artificial Sequence
  Designed; as detailed elsewhere in present application
  MISC_FEATURE (15)..(15): Xaa at this position is a single (one, 1) amino acid (or lack thereof) selected from the following options: Ala Val Leu Ile Gly Pro or absent (no amino acid at this position and so this position is not present)
  MISC_FEATURE (15)..(36): If adjacent residues are both cysteine, optionally they can be connected by a disulfide, instead of a peptide, bond
  MISC_FEATURE (16)..(16): Xaa at this position is a single (one, 1) amino acid (or lack thereof) selected from the following options: Cys Gly Pro or absent (no amino acid at this position and so this position is not present)
  MISC_FEATURE (17)..(17): Xaa at this position is a single (one, 1) amino acid (or lack thereof) selected from the following options: Cys Gly Pro or absent (no amino acid at this position and so this position is not present)
  MISC_FEATURE (18)..(18): Xaa at this position is a single (one, 1) amino acid (or lack thereof) selected from the following options: Ala Val Leu Ile Gly Pro Ala Val Leu Ile or absent (no amino acid at this position and so this position is not present)
  MISC_FEATURE (19)..(19): Xaa at this position is a single (one, 1) amino acid (or lack thereof) selected from the following options: Tyr Cys Gly Pro Ala Val Leu Ile or absent (no amino acid at this position and so this position is not present)
  MISC_FEATURE (20)..(20): Xaa at this position is a single (one, 1) amino acid (or lack thereof) selected from the following options: Gly Cys Pro Ala Val Leu Ile or absent (no amino acid at this position and so this position is not present)
  MISC_FEATURE (30)..(30): Xaa at this position is a single (one, 1) amino acid (or lack thereof) selected from the following options: Pro Cys Gly Ala Val Leu Ile or absent (no amino acid at this position and so this position is not present)
  MISC_FEATURE (31)..(31): Xaa at this position is a single (one, 1) amino acid (or lack thereof) selected from the following options: Pro Cys Gly Ala Val Leu Ile or absent (no amino acid at this position and so this position is not present)
  MISC_FEATURE (32)..(32): Xaa at this position is a single (one, 1) amino acid (or lack thereof) selected from the following options: Gln Cys Gly Pro Ala Val Leu Ile or absent (no amino acid at this position and so this position is not present)
  MISC_FEATURE (33)..(33): Xaa at this position is a single (one, 1) amino acid (or lack thereof) selected from the following options: Ala Val Leu Ile Gly Pro Ala Val Leu Ile or absent (no amino acid at this position and so this position is not present)
  MISC_FEATURE (34)..(34): Xaa at this position is a single (one, 1) amino acid (or lack thereof) selected from the following options: Cys Gly Pro Ala Val Leu Ile or absent (no amino acid at this position and so this position is not present)
  MISC_FEATURE (35)..(35): Xaa at this position is a single (one, 1) amino acid (or lack thereof) selected from the following options: Cys Gly Pro Ala Val Leu Ile or absent (no amino acid at this position and so this position is not present)
  MISC_FEATURE (36)..(36): Xaa at this position is a single (one, 1) amino acid (or lack thereof) selected from the following options: Ala Val Leu Ile Gly Pro Ala Val Leu Ile or absent (no amino acid at this position and so this position is not present)
  MISC_FEATURE (39)..(39): Xaa at this position is a single (one, 1) amino acid selected from the following options: Val Gly Ala Thr
  MISC_FEATURE (40)..(40): Xaa at this position is a single (one, 1) amino acid selected from the following options: Thr Ser Pro
  MISC_FEATURE (41)..(41): Xaa at this position is a single (one, 1) amino acid selected from the following options: Glu Ala Val
  MISC_FEATURE (42)..(42): Xaa at this position is a single (one, 1) amino acid selected from the following options: Leu Thr Gln
  MISC_FEATURE (43)..(43): Xaa at this position is a single (one, 1) amino acid selected from the following options: Ala Val
  MISC_FEATURE (44)..(44): Xaa at this position is a single (one, 1) amino acid selected from the following options: Ala Val Leu Ile Thr
  MISC_FEATURE (45)..(45): Xaa at this position is a single (one, 1) amino acid selected from the following options: Trp Arg Gln
  MISC_FEATURE (46)..(46): Xaa at this position is a single (one, 1) amino acid selected from the following options: Thr Val Met Ala Ser Leu
  MISC_FEATURE (47)..(47): Xaa at this position is a single (one, 1) amino acid selected from the following options: Gln Trp Arg
  MISC_FEATURE (48)..(48): Xaa at this position is a single (one, 1) amino acid selected from the following options: Leu Phe Gln
  MISC_FEATURE (49)..(49): Xaa at this position is a single (one, 1) amino acid selected from the following options: Arg Gly Tyr Cys Ala
  MISC_FEATURE (50)..(50): Xaa at this position is a single (one, 1) amino acid selected from the following options: Val Ser Ala Thr Met Arg
  MISC_FEATURE (51)..(51): Xaa at this position is a single (one, 1) amino acid selected from the following options: Trp Leu
  MISC_FEATURE (52)..(52): Xaa at this position is a single (one, 1) amino acid selected from the following options: Gly Ser
  MISC_FEATURE (53)..(53): Xaa at this position is a single (one, 1) amino acid selected from the following options: Val Ala Met
  MISC_FEATURE (54)..(54): Xaa at this position is a single (one, 1) amino acid selected from the following options: Arg Trp Lys Leu
  MISC_FEATURE (55)..(55): Xaa at this position is a single (one, 1) amino acid selected from the following options: Thr Ala Val Ser
  MISC_FEATURE (56)..(56): Xaa at this position is a single (one, 1) amino acid selected from the following options: Met Leu Ile Arg Val Ala Thr
  MISC_FEATURE (57)..(57): Xaa at this position is a single (one, 1) amino acid selected from the following options: Gln Arg
  MISC_FEATURE (58)..(58): Xaa at this position is a single (one, 1) amino acid selected from the following options: Ala Thr Gly Ser
  MISC_FEATURE (59)..(59): Xaa at this position is a single (one, 1) amino acid selected from the following options: Leu Arg Gln Gly
  MISC_FEATURE (60)..(60): Xaa at this position is a single (one, 1) amino acid selected from the following options: Gly Ser
  MISC_FEATURE (61)..(61): Xaa at this position is a single (one, 1) amino acid selected from the following options: Phe Tyr
  MISC_FEATURE (62)..(62): Xaa at this position is a single (one, 1) amino acid selected from the following options: Gly Ser Val Ala Thr Leu Arg Phe Ile Lys Met Gln Asn
  MISC_FEATURE (63)..(63): Xaa at this position is a single (one, 1) amino acid selected from the following options: Ser Cys Arg Gly Phe Thr Pro
  MISC_FEATURE (64)..(64): Xaa at this position is a single (one, 1) amino acid selected from the following options: Asp Glu Gly Ser Phe Lys Thr Leu Phe Pro
  MISC_FEATURE (65)..(65): Xaa at this position is a single (one, 1) amino acid selected from the following options: Pro Gln Arg Ser Thr Lys Gly Glu Ala Phe
  MISC_FEATURE (66)..(66): Xaa at this position is a single (one, 1) amino acid selected from the following options: Ser Pro Ala Gly Arg Glu Asp Val
  MISC_FEATURE (67)..(67): Xaa at this position is a single (one, 1) amino acid selected from the following options: Glu Asp Lys His Ala Gly Asn Ser Arg Gln Asp Thr Leu Val
  MISC_FEATURE (68)..(68): Xaa at this position is a single (one, 1) amino acid selected from the following options: Asn Asp Tyr Ser Gly Arg His Lys Glu Ala Leu
  MISC_FEATURE (69)..(69): Xaa at this position is a single (one, 1) amino acid selected from the following options: Val Leu Pro His Met Ile Phe Thr Gly Gly Ser Asp Glu Phe
  MISC_FEATURE (70)..(70): Xaa at this position is a single (one, 1) amino acid selected from the following options: Asp Gly His Arg Ser Glu Pro
  MISC_FEATURE (71)..(71): Xaa at this position is a single (one, 1) amino acid selected from the following options: Arg Ser Gly Thr Pro Ala Lys Glu
  MISC_FEATURE (72)..(72): Xaa at this position is a single (one, 1) amino acid selected from the following options: Arg Thr Gly Ser Arg Pro Lys Asp Ala
  MISC_FEATURE (73)..(73): Xaa at this position is a single (one, 1) amino acid selected from the following options: Ala Glu Ser Gly Arg
  MISC_FEATURE (74)..(74): Xaa at this position is a single (one, 1) amino acid selected from the following options: Ala Gly Gln Pro
  MISC_FEATURE (75)..(75): Xaa at this position is a single (one, 1) amino acid selected from the following options: Gly Pro Ala Val Leu Ile Met Cys Phe Tyr Trp His Lys Arg Gln Asn Glu Asp Ser Thr
  MISC_FEATURE (76)..(76): Xaa at this position is a single (one, 1) amino acid selected from the following options: Ile Val Leu Glu Phe
  MISC_FEATURE (77)..(77): Xaa at this position is a single (one, 1) amino acid selected from the following options: Trp Arg Lys Glu Thr Tyr
  MISC_FEATURE (78)..(78): Xaa at this position is a single (one, 1) amino acid selected from the following options: Asn Glu Asp Ala Lys Ser
  MISC_FEATURE (79)..(79): Xaa at this position is a single (one, 1) amino acid selected from the following options: Ala Arg Lys Cys
  MISC_FEATURE (80)..(80): Xaa at this position is a single (one, 1) amino acid selected from the following options: Gly Tyr Glu Pro
  MISC_FEATURE (81)..(81): Xaa at this position is a single (one, 1) amino acid selected from the following options: Val Gly Phe Lys Arg
  MISC_FEATURE (82)..(82): Xaa at this position is a single (one, 1) amino acid selected from the following options: Asp Ala Ser Arg Leu
  MISC_FEATURE (83)..(83): Xaa at this position is a single (one, 1) amino acid selected from the following options: Phe Leu Ile Glu Ser
  MISC_FEATURE (84)..(84): Xaa at this position is a single (one, 1) amino acid selected from the following options: Arg Gly Ala Ile Glu Ser Pro
  MISC_FEATURE (85)..(85): Xaa at this position is a single (one, 1) amino acid selected from the following options: Lys Arg Thr Glu Gln
  MISC_FEATURE (86)..(86): Xaa at this position is a single (one, 1) amino acid selected from the following options: Arg Lys Met
  MISC_FEATURE (87)..(87): Xaa at this position is a single (one, 1) amino acid selected from the following options: Gly Pro Ala Val Leu Ile Met Cys Phe Tyr Trp His Lys Arg Gln Asn Glu Asp Ser Thr
  MISC_FEATURE (88)..(88): Xaa at this position is a single (one, 1) amino acid selected from the following options: Gln Ala Lys Arg Pro Phe Val
  MISC_FEATURE (89)..(89): Xaa at this position is a single (one, 1) amino acid selected from the following options: Ala Ser Arg
  MISC_FEATURE (90)..(90): Xaa at this position is a single (one, 1) amino acid selected from the following options: Lys Glu Asp His Ala Ile
  MISC_FEATURE (91)..(91): Xaa at this position is a single (one, 1) amino acid selected from the following options: Gly Glu Pro Arg
  MISC_FEATURE (92)..(92): Xaa at this position is a single (one, 1) amino acid selected from the following options: Glu Asp Tyr Thr Gln
  MISC_FEATURE (93)..(93): Xaa at this position is a single (one, 1) amino acid selected from the following options: Arg Met Lys
  MISC_FEATURE (94)..(94): Xaa at this position is a single (one, 1) amino acid selected from the following options: Tyr Phe Glu
  MISC_FEATURE (95)..(95): Xaa at this position is a single (one, 1) amino acid selected from the following options: Leu Phe Pro Gln
  MISC_FEATURE (96)..(96): Xaa at this position is a single (one, 1) amino acid selected from the following options: Arg Leu Lys
  MISC_FEATURE (97)..(97): Xaa at this position is a single (one, 1) amino acid selected from the following options: Ala Lys Glu Thr Asp Gln Arg
  MISC_FEATURE (98)..(98): Xaa at this position is a single (one, 1) amino acid selected from the following options: Gln Arg Lys Ala Cys
  MISC_FEATURE (99)..(99): Xaa at this position is a single (one, 1) amino acid selected from the following options: Ser Thr Ala Asn Glu Leu
  MISC_FEATURE (100)..(100): Xaa at this position is a single (one, 1) amino acid selected from the following options: Arg Lys Gln His Ala
  MISC_FEATURE (101)..(101): Xaa at this position is a single (one, 1) amino acid selected from the following options: Glu Gln Lys
  MISC_FEATURE (102)..(102): Xaa at this position is a single (one, 1) amino acid selected from the following options: Gln Lys
  MISC_FEATURE (103)..(103): Xaa at this position is a single (one, 1) amino acid selected from the following options: Leu His Met Glu
  MISC_FEATURE (104)..(104): Xaa at this position is a single (one, 1) amino acid selected from the following options: Ala Leu Glu Thr Asp Ser
  MISC_FEATURE (105)..(105): Xaa at this position is a single (one, 1) amino acid selected from the following options: Ala Thr Arg Ile Ser Asn Val Met Asp
  MISC_FEATURE (106)..(106): Xaa at this position is a single (one, 1) amino acid selected from the following options: Leu Glu
  MISC_FEATURE (107)..(107): Xaa at this position is a single (one, 1) amino acid selected from the following options: Lys Arg Ile
  MISC_FEATURE (108)..(108): Xaa at this position is a single (one, 1) amino acid selected from the following options: Lys Asn Arg Thr Glu
  MISC_FEATURE (109)..(109): Xaa at this position is a single (one, 1) amino acid selected from the following options: Gly Pro Ala Val Leu Ile Met Cys Phe Tyr Trp His Lys Arg Gln Asn Glu Asp Ser Thr
  MISC_FEATURE (110)..(110): Xaa at this position is a single (one, 1) amino acid selected from the following options: Gly Pro Ala Val Leu Ile Met Cys Phe Tyr Trp His Lys Arg Gln Asn Glu Asp Ser Thr
  MISC_FEATURE (111)..(111): Xaa at this position is a single (one, 1) amino acid selected from the following options: Glu Gln Lys Val
  MISC_FEATURE (112)..(112): Xaa at this position is a single (one, 1) amino acid selected from the following options: Glu Asp Asn Lys
  MISC_FEATURE (113)..(113): Xaa at this position is a single (one, 1) amino acid selected from the following options: Glu Val
  MISC_FEATURE (114)..(114): Xaa at this position is a single (one, 1) amino acid selected from the following options: Ile Val
  MISC_FEATURE (115)..(115): Xaa at this position is a single (one, 1) amino acid selected from the following options: Val Thr Ser Asp Asn Gly Ala Glu Gln Tyr Arg
  MISC_FEATURE (116)..(116): Xaa at this position is a single (one, 1) amino acid selected from the following options: Gly Pro Ala Val Leu Ile Met Cys Phe Tyr Trp His Lys Arg Gln Asn Glu Asp Ser Thr
  MISC_FEATURE (117)..(117): Xaa at this position is a single (one, 1) amino acid selected from the following options: Gly Pro Ala Val Leu Ile Met Cys Phe Tyr Trp His Lys Arg Gln Asn Glu Asp Ser Thr
  MISC_FEATURE (118)..(118): Xaa at this position is a single (one, 1) amino acid selected from the following options: Lys Ser Met Val His Ala Arg Gln Glu Ile Leu Val
  MISC_FEATURE (119)..(119): Xaa at this position is a single (one, 1) amino acid selected from the following options: Lys Glu Gln Arg Gly
  MISC_FEATURE (120)..(120): Xaa at this position is a single (one, 1) amino acid selected from the following options: Glu Ala Gln
HHHHHHDYKDDDDKXXXXXXRKKRRQRRRXXXXXXXMAXXXXXXXXXXXXXXXXXXXXXXXXXXXXXXXXXXXXXXXXXXXXXXXXXXXXXXXXXXXXXXXXXXXXXXXXXXXXXXXXXXI

SEQ ID NO: 147 - protein, 112 aa, Artificial Sequence
  Designed; as detailed elsewhere in present application
  MISC_FEATURE (15)..(15): Xaa at this position is a single (one, 1) amino acid (or lack thereof) selected from the following options: Ala Val Leu Ile Gly Pro or absent (no amino acid at this position and so this position is not present)
  MISC_FEATURE (15)..(36): If adjacent residues are both cysteine, optionally they can be connected by a disulfide, instead of a peptide, bond
  MISC_FEATURE (16)..(16): Xaa at this position is a single (one, 1) amino acid (or lack thereof) selected from the following options: Cys Gly Pro or absent (no amino acid at this position and so this position is not present)
  MISC_FEATURE (17)..(17): Xaa at this position is a single (one, 1) amino acid (or lack thereof) selected from the following options: Cys Gly Pro or absent (no amino acid at this position and so this position is not present)
  MISC_FEATURE (18)..(18): Xaa at this position is a single (one, 1) amino acid (or lack thereof) selected from the following options: Ala Val Leu Ile Gly Pro Ala Val Leu Ile or absent (no amino acid at this position and so this position is not present)
  MISC_FEATURE (19)..(19): Xaa at this position is a single (one, 1) amino acid (or lack thereof) selected from the following options: Tyr Cys Gly Pro Ala Val Leu Ile or absent (no amino acid at this position and so this position is not present)
  MISC_FEATURE (20)..(20): Xaa at this position is a single (one, 1) amino acid (or lack thereof) selected from the following options: Gly Cys Pro Ala Val Leu Ile or absent (no amino acid at this position and so this position is not present)
  MISC_FEATURE (30)..(30): Xaa at this position is a single (one, 1) amino acid (or lack thereof) selected from the following options: Pro Cys Gly Ala Val Leu Ile or absent (no amino acid at this position and so this position is not present)
  MISC_FEATURE (31)..(31): Xaa at this position is a single (one, 1) amino acid (or lack thereof) selected from the following options: Pro Cys Gly Ala Val Leu Ile or absent (no amino acid at this position and so this position is not present)
  MISC_FEATURE (32)..(32): Xaa at this position is a single (one, 1) amino acid (or lack thereof) selected from the following options: Gln Cys Gly Pro Ala Val Leu Ile or absent (no amino acid at this position and so this position is not present)
  MISC_FEATURE (33)..(33): Xaa at this position is a single (one, 1) amino acid (or lack thereof) selected from the following options: Ala Val Leu Ile Gly Pro Ala Val Leu Ile or absent (no amino acid at this position and so this position is not present)
  MISC_FEATURE (34)..(34): Xaa at this position is a single (one, 1) amino acid (or lack thereof) selected from the following options: Cys Gly Pro Ala Val Leu Ile or absent (no amino acid at this position and so this position is not present)
  MISC_FEATURE (35)..(35): Xaa at this position is a single (one, 1) amino acid (or lack thereof) selected from the following options: Cys Gly Pro Ala Val Leu Ile or absent (no amino acid at this position and so this position is not present)
  MISC_FEATURE (36)..(36): Xaa at this position is a single (one, 1) amino acid (or lack thereof) selected from the following options: Ala Val Leu Ile Gly Pro Ala Val Leu Ile or absent (no amino acid at this position and so this position is not present)
  MISC_FEATURE (39)..(39): Xaa at this position is a single (one, 1) amino acid selected from the following options: Val Gly Ala Thr
  MISC_FEATURE (40)..(40): Xaa at this position is a single (one, 1) amino acid selected from the following options: Thr Ser Pro
  MISC_FEATURE (41)..(41): Xaa at this position is a single (one, 1) amino acid selected from the following options: Glu Ala Val
  MISC_FEATURE (42)..(42): Xaa at this position is a single (one, 1) amino acid selected from the following options: Leu Thr Gln
  MISC_FEATURE (43)..(43): Xaa at this position is a single (one, 1) amino acid selected from the following options: Ala Val
  MISC_FEATURE (44)..(44): Xaa at this position is a single (one, 1) amino acid selected from the following options: Ala Val Leu Ile Thr
  MISC_FEATURE (45)..(45): Xaa at this position is a single (one, 1) amino acid selected from the following options: Trp Arg Gln
  MISC_FEATURE (46)..(46): Xaa at this position is a single (one, 1) amino acid selected from the following options: Thr Val Met Ala Ser Leu
  MISC_FEATURE (47)..(47): Xaa at this position is a single (one, 1) amino acid selected from the following options: Gln Trp Arg
  MISC_FEATURE (48)..(48): Xaa at this position is a single (one, 1) amino acid selected from the following options: Leu Phe Gln
  MISC_FEATURE (49)..(49): Xaa at this position is a single (one, 1) amino acid selected from the following options: Arg Gly Tyr Cys Ala
  MISC_FEATURE (50)..(50): Xaa at this position is a single (one, 1) amino acid selected from the following options: Val Ser Ala Thr Met Arg
  MISC_FEATURE (51)..(51): Xaa at this position is a single (one, 1) amino acid selected from the following options: Trp Leu
  MISC_FEATURE (52)..(52): Xaa at this position is a single (one, 1) amino acid selected from the following options: Gly Ser
  MISC_FEATURE (53)..(53): Xaa at this position is a single (one, 1) amino acid selected from the following options: Val Ala Met
  MISC_FEATURE (54)..(54): Xaa at this position is a single (one, 1) amino acid selected from the following options: Arg Trp Lys Leu
  MISC_FEATURE (55)..(55): Xaa at this position is a single (one, 1) amino acid selected from the following options: Thr Ala Val Ser
  MISC_FEATURE (56)..(56): Xaa at this position is a single (one, 1) amino acid selected from the following options: Met Leu Ile Arg Val Ala Thr
  MISC_FEATURE (57)..(57): Xaa at this position is a single (one, 1) amino acid selected from the following options: Gln Arg
  MISC_FEATURE (58)..(58): Xaa at this position is a single (one, 1) amino acid selected from the following options: Ala Thr Gly Ser
  MISC_FEATURE (59)..(59): Xaa at this position is a single (one, 1) amino acid selected from the following options: Leu Arg Gln Gly
  MISC_FEATURE (60)..(60): Xaa at this position is a single (one, 1) amino acid selected from the following options: Gly Ser
  MISC_FEATURE (61)..(61): Xaa at this position is a single (one, 1) amino acid selected from the following options: Phe Tyr
  MISC_FEATURE (62)..(62): Xaa at this position is a single (one, 1) amino acid selected from the following options: Arg Ser Gly Thr Pro Ala Lys Glu
  MISC_FEATURE (63)..(63): Xaa at this position is a single (one, 1) amino acid selected from the following options: Arg Thr Gly Ser Arg Pro Lys Asp Ala
  MISC_FEATURE (64)..(64): Xaa at this position is a single (one, 1) amino acid selected from the following options: Ala Glu Ser Gly Arg
  MISC_FEATURE (65)..(65): Xaa at this position is a single (one, 1) amino acid selected from the following options: Ala Gly Gln Pro
  MISC_FEATURE (66)..(66): Xaa at this position is a single (one, 1) amino acid selected from the following options: Gly Pro Ala Val Leu Ile Met Cys Phe Tyr Trp His Lys Arg Gln Asn Glu Asp Ser Thr
  MISC_FEATURE (67)..(67): Xaa at this position is a single (one, 1) amino acid selected from the following options: Ile Val Leu Glu Phe
  MISC_FEATURE (68)..(68): Xaa at this position is a single (one, 1) amino acid selected from the following options: Trp Arg Lys Glu Thr Tyr
  MISC_FEATURE (69)..(69): Xaa at this position is a single (one, 1) amino acid selected from the following options: Asn Glu Asp Ala Lys Ser
  MISC_FEATURE (70)..(70): Xaa at this position is a single (one, 1) amino acid selected from the following options: Ala Arg Lys Cys
  MISC_FEATURE (71)..(71): Xaa at this position is a single (one, 1) amino acid selected from the following options: Gly Tyr Glu Pro
  MISC_FEATURE (72)..(72): Xaa at this position is a single (one, 1) amino acid selected from the following options: Val Gly Phe Lys Arg
  MISC_FEATURE (73)..(73): Xaa at this position is a single (one, 1) amino acid selected from the following options: Asp Ala Ser Arg Leu
  MISC_FEATURE (74)..(74): Xaa at this position is a single (one, 1) amino acid selected from the following options: Phe Leu Ile Glu Ser
  MISC_FEATURE (75)..(75): Xaa at this position is a single (one, 1) amino acid selected from the following options: Arg Gly Ala Ile Glu Ser Pro
  MISC_FEATURE (76)..(76): Xaa at this position is a single (one, 1) amino acid selected from the following options: Lys Arg Thr Glu Gln
  MISC_FEATURE (77)..(77): Xaa at this position is a single (one, 1) amino acid selected from the following options: Arg Lys Met
  MISC_FEATURE (78)..(78): Xaa at this position is a single (one, 1) amino acid selected from the following options: Gly Pro Ala Val Leu Ile Met Cys Phe Tyr Trp His Lys Arg Gln Asn Glu Asp Ser Thr
  MISC_FEATURE (79)..(79): Xaa at this position is a single (one, 1) amino acid selected from the following options: Gln Ala Lys Arg Pro Phe Val
  MISC_FEATURE (80)..(80): Xaa at this position is a single (one, 1) amino acid selected from the following options: Ala Ser Arg
  MISC_FEATURE (81)..(81): Xaa at this position is a single (one, 1) amino acid selected from the following options: Lys Glu Asp His Ala Ile
  MISC_FEATURE (82)..(82): Xaa at this position is a single (one, 1) amino acid selected from the following options: Gly Glu Pro Arg
  MISC_FEATURE (83)..(83): Xaa at this position is a single (one, 1) amino acid selected from the following options: Glu Asp Tyr Thr Gln
  MISC_FEATURE (84)..(84): Xaa at this position is a single (one, 1) amino acid selected from the following options: Arg Met Lys
  MISC_FEATURE (85)..(85): Xaa at this position is a single (one, 1) amino acid selected from the following options: Tyr Phe Glu
  MISC_FEATURE (86)..(86): Xaa at this position is a single (one, 1) amino acid selected from the following options: Leu Phe Pro Gln
  MISC_FEATURE (87)..(87): Xaa at this position is a single (one, 1) amino acid selected from the following options: Arg Leu Lys
  MISC_FEATURE (88)..(88): Xaa at this position is a single (one, 1) amino acid selected from the following options: Ala Lys Glu Thr Asp Gln Arg
  MISC_FEATURE (89)..(89): Xaa at this position is a single (one, 1) amino acid selected from the following options: Gln Arg Lys Ala Cys
  MISC_FEATURE (90)..(90): Xaa at this position is a single (one, 1) amino acid selected from the following options: Ser Thr Ala Asn Glu Leu
  MISC_FEATURE (91)..(91): Xaa at this position is a single (one, 1) amino acid selected from the following options: Arg Lys Gln His Ala
  MISC_FEATURE (92)..(92): Xaa at this position is a single (one, 1) amino acid selected from the following options: Glu Gln Lys
  MISC_FEATURE (93)..(93): Xaa at this position is a single (one, 1) amino acid selected from the following options: Gln Lys
  MISC_FEATURE (94)..(94): Xaa at this position is a single (one, 1) amino acid selected from the following options: Leu His Met Glu
  MISC_FEATURE (95)..(95): Xaa at this position is a single (one, 1) amino acid selected from the following options: Ala Leu Glu Thr Asp Ser
  MISC_FEATURE (96)..(96): Xaa at this position is a single (one, 1) amino acid selected from the following options: Ala Thr Arg Ile Ser Asn Val Met Asp
  MISC_FEATURE (97)..(97): Xaa at this position is a single (one, 1) amino acid selected from the following options: Leu Glu
  MISC_FEATURE (98)..(98): Xaa at this position is a single (one, 1) amino acid selected from the following options: Lys Arg Ile
  MISC_FEATURE (99)..(99): Xaa at this position is a single (one, 1) amino acid selected from the following options: Lys Asn Arg Thr Glu
  MISC_FEATURE (100)..(100): Xaa at this position is a single (one, 1) amino acid selected from the following options: Gly Pro Ala Val Leu Ile Met Cys Phe Tyr Trp His Lys Arg Gln Asn Glu Asp Ser Thr
  MISC_FEATURE (101)..(101): Xaa at this position is a single (one, 1) amino acid selected from the following options: Gly Pro Ala Val Leu Ile Met Cys Phe Tyr Trp His Lys Arg Gln Asn Glu Asp Ser Thr
  MISC_FEATURE (102)..(102): Xaa at this position is a single (one, 1) amino acid selected from the following options: Glu Gln Lys Val
  MISC_FEATURE (103)..(103): Xaa at this position is a single (one, 1) amino acid selected from the following options: Glu Asp Asn Lys
  MISC_FEATURE (104)..(104): Xaa at this position is a single (one, 1) amino acid selected from the following options: Glu Val
  MISC_FEATURE (105)..(105): Xaa at this position is a single (one, 1) amino acid selected from the following options: Ile Val
  MISC_FEATURE (106)..(106): Xaa at this position is a single (one, 1) amino acid selected from the following options: Val Thr Ser Asp Asn Gly Ala Glu Gln Tyr Arg
  MISC_FEATURE (107)..(107): Xaa at this position is a single (one, 1) amino acid selected from the following options: Gly Pro Ala Val Leu Ile Met Cys Phe Tyr Trp His Lys Arg Gln Asn Glu Asp Ser Thr
  MISC_FEATURE (108)..(108): Xaa at this position is a single (one, 1) amino acid selected from the following options: Gly Pro Ala Val Leu Ile Met Cys Phe Tyr Trp His Lys Arg Gln Asn Glu Asp Ser Thr
  MISC_FEATURE (109)..(109): Xaa at this position is a single (one, 1) amino acid selected from the following options: Lys Ser Met Val His Ala Arg Gln Glu Ile Leu Val
  MISC_FEATURE (110)..(110): Xaa at this position is a single (one, 1) amino acid selected from the following options: Lys Glu Gln Arg Gly
  MISC_FEATURE (111)..(111): Xaa at this position is a single (one, 1) amino acid selected from the following options: Glu Ala Gln
HHHHHHDYKDDDDKXXXXXXRKKRRQRRRXXXXXXXMAXXXXXXXXXXXXXXXXXXXXXXXXXXXXXXXXXXXXXXXXXXXXXXXXXXXXXXXXXXXXXXXXXXXXXXXXXI

SEQ ID NO: 148 - protein, 96 aa, Artificial Sequence
  Designed; as detailed elsewhere in present application
  MISC_FEATURE (15)..(15): Xaa at this position is a single (one, 1) amino acid (or lack thereof) selected from the following options: Ala Val Leu Ile Gly Pro or absent (no amino acid at this position and so this position is not present)
  MISC_FEATURE (15)..(36): If adjacent residues are both cysteine, optionally they can be connected by a disulfide, instead of a peptide, bond
  MISC_FEATURE (16)..(16): Xaa at this position is a single (one, 1) amino acid (or lack thereof) selected from the following options: Cys Gly Pro or absent (no amino acid at this position and so this position is not present)
  MISC_FEATURE (17)..(17): Xaa at this position is a single (one, 1) amino acid (or lack thereof) selected from the following options: Cys Gly Pro or absent (no amino acid at this position and so this position is not present)
  MISC_FEATURE (18)..(18): Xaa at this position is a single (one, 1) amino acid (or lack thereof) selected from the following options: Ala Val Leu Ile Gly Pro Ala Val Leu Ile or absent (no amino acid at this position and so this position is not present)
  MISC_FEATURE (19)..(19): Xaa at this position is a single (one, 1) amino acid (or lack thereof) selected from the following options: Tyr Cys Gly Pro Ala Val Leu Ile or absent (no amino acid at this position and so this position is not present)
  MISC_FEATURE (20)..(20): Xaa at this position is a single (one, 1) amino acid (or lack thereof) selected from the following options: Gly Cys Pro Ala Val Leu Ile or absent (no amino acid at this position and so this position is not present)
  MISC_FEATURE (30)..(30): Xaa at this position is a single (one, 1) amino acid (or lack thereof) selected from the following options: Pro Cys Gly Ala Val Leu Ile or absent (no amino acid at this position and so this position is not present)
  MISC_FEATURE (31)..(31): Xaa at this position is a single (one, 1) amino acid (or lack thereof) selected from the following options: Pro Cys Gly Ala Val Leu Ile or absent (no amino acid at this position and so this position is not present)
  MISC_FEATURE (32)..(32): Xaa at this position is a single (one, 1) amino acid (or lack thereof) selected from the following options: Gln Cys Gly Pro Ala Val Leu Ile or absent (no amino acid at this position and so this position is not present)
  MISC_FEATURE (33)..(33): Xaa at this position is a single (one, 1) amino acid (or lack thereof) selected from the following options: Ala Val Leu Ile Gly Pro Ala Val Leu Ile or absent (no amino acid at this position and so this position is not present)
  MISC_FEATURE (34)..(34): Xaa at this position is a single (one, 1) amino acid (or lack thereof) selected from the following options: Cys Gly Pro Ala Val Leu Ile or absent (no amino acid at this position and so this position is not present)
  MISC_FEATURE (35)..(35): Xaa at this position is a single (one, 1) amino acid (or lack thereof) selected from the following options: Cys Gly Pro Ala Val Leu Ile or absent (no amino acid at this position and so this position is not present)
  MISC_FEATURE (36)..(36): Xaa at this position is a single (one, 1) amino acid (or lack thereof) selected from the following options: Ala Val Leu Ile Gly Pro Ala Val Leu Ile or absent (no amino acid at this position and so this position is not present)
  MISC_FEATURE (39)..(39): Xaa at this position is a single (one, 1) amino acid selected from the following options: Val Gly Ala Thr
  MISC_FEATURE (40)..(40): Xaa at this position is a single (one, 1) amino acid selected from the following options: Thr Ser Pro
  MISC_FEATURE (41)..(41): Xaa at this position is a single (one, 1) amino acid selected from the following options: Glu Ala Val
  MISC_FEATURE (42)..(42): Xaa at this position is a single (one, 1) amino acid selected from the following options: Leu Thr Gln
  MISC_FEATURE (43)..(43): Xaa at this position is a single (one, 1) amino acid selected from the following options: Ala Val
  MISC_FEATURE (44)..(44): Xaa at this position is a single (one, 1) amino acid selected from the following options: Ala Val Leu Ile Thr
  MISC_FEATURE (45)..(45): Xaa at this position is a single (one, 1) amino acid selected from the following options: Trp Arg Gln
  MISC_FEATURE (46)..(46): Xaa at this position is a single (one, 1) amino acid selected from the following options: Thr Val Met Ala Ser Leu
  MISC_FEATURE (47)..(47): Xaa at this position is a single (one, 1) amino acid selected from the following options: Gln Trp Arg
  MISC_FEATURE (48)..(48): Xaa at this position is a single (one, 1) amino acid selected from the following options: Leu Phe Gln
  MISC_FEATURE (49)..(49): Xaa at this position is a single (one, 1) amino acid selected from the following options: Arg Gly Tyr Cys Ala
  MISC_FEATURE (50)..(50): Xaa at this position is a single (one, 1) amino acid selected from the following options: Val Ser Ala Thr Met Arg
  MISC_FEATURE (51)..(51): Xaa at this position is a single (one, 1) amino acid selected from the following options: Trp Leu
  MISC_FEATURE (52)..(52): Xaa at this position is a single (one, 1) amino acid selected from the following options: Gly Ser
  MISC_FEATURE (53)..(53): Xaa at this position is a single (one, 1) amino acid selected from the following options: Val Ala Met
  MISC_FEATURE (54)..(54): Xaa at this position is a single (one, 1) amino acid selected from the following options: Arg Trp Lys Leu
  MISC_FEATURE (55)..(55): Xaa at this position is a single (one, 1) amino acid selected from the following options: Thr Ala Val Ser
  MISC_FEATURE (56)..(56): Xaa at this position is a single (one, 1) amino acid selected from the following options: Met Leu Ile Arg Val Ala Thr
  MISC_FEATURE (57)..(57): Xaa at this position is a single (one, 1) amino acid selected from the following options: Gln Arg
  MISC_FEATURE (58)..(58): Xaa at this position is a single (one, 1) amino acid selected from the following options: Ala Thr Gly Ser
  MISC_FEATURE (59)..(59): Xaa at this position is a single (one, 1) amino acid selected from the following options: Leu Arg Gln Gly
  MISC_FEATURE (60)..(60): Xaa at this position is a single (one, 1) amino acid selected from the following options: Gly Ser
  MISC_FEATURE (61)..(61): Xaa at this position is a single (one, 1) amino acid selected from the following options: Phe Tyr
  MISC_FEATURE (62)..(62): Xaa at this position is a single (one, 1) amino acid selected from the following options: Ala Gly Gln Pro
  MISC_FEATURE (63)..(63): Xaa at this position is a single (one, 1) amino acid selected from the following options: Gly Pro Ala Val Leu Ile Met Cys Phe Tyr Trp His Lys Arg Gln Asn Glu Asp Ser Thr
  MISC_FEATURE (64)..(64): Xaa at this position is a single (one, 1) amino acid selected from the following options: Ile Val Leu Glu Phe
  MISC_FEATURE (65)..(65): Xaa at this position is a single (one, 1) amino acid selected from the following options: Trp Arg Lys Glu Thr Tyr
  MISC_FEATURE (66)..(66): Xaa at this position is a single (one, 1) amino acid selected from the following options: Asn Glu Asp Ala Lys Ser
  MISC_FEATURE (67)..(67): Xaa at this position is a single (one, 1) amino acid selected from the following options: Ala Arg Lys Cys
  MISC_FEATURE (68)..(68): Xaa at this position is a single (one, 1) amino acid selected from the following options: Gly Tyr Glu Pro
  MISC_FEATURE (69)..(69): Xaa at this position is a single (one, 1) amino acid selected from the following options: Val Gly Phe Lys Arg
  MISC_FEATURE (70)..(70): Xaa at this position is a single (one, 1) amino acid selected from the following options: Asp Ala Ser Arg Leu
  MISC_FEATURE (71)..(71): Xaa at this position is a single (one, 1) amino acid selected from the following options: Phe Leu Ile Glu Ser
  MISC_FEATURE (72)..(72): Xaa at this position is a single (one, 1) amino acid selected from the following options: Arg Gly Ala Ile Glu Ser Pro
  MISC_FEATURE (73)..(73): Xaa at this position is a single (one, 1) amino acid selected from the following options: Lys Arg Thr Glu Gln
  MISC_FEATURE (74)..(74): Xaa at this position is a single (one, 1) amino acid selected from the following options: Arg Lys Met
  MISC_FEATURE (75)..(75): Xaa at this position is a single (one, 1) amino acid selected from the following options: Gly Pro Ala Val Leu Ile Met Cys Phe Tyr Trp His Lys Arg Gln Asn Glu Asp Ser Thr
  MISC_FEATURE (76)..(76): Xaa at this position is a single (one, 1) amino acid selected from the following options: Gln Ala Lys Arg Pro Phe Val
  MISC_FEATURE (77)..(77): Xaa at this position is a single (one, 1) amino acid selected from the following options: Ala Ser Arg
  MISC_FEATURE (78)..(78): Xaa at this position is a single (one, 1) amino acid selected from the following options: Lys Glu Asp His Ala Ile
  MISC_FEATURE (79)..(79): Xaa at this position is a single (one, 1) amino acid selected from the following options: Gly Glu Pro Arg
  MISC_FEATURE (80)..(80): Xaa at this position is a single (one, 1) amino acid selected from the following options: Glu Asp Tyr Thr Gln
  MISC_FEATURE (81)..(81): Xaa at this position is a single (one, 1) amino acid selected from the following options: Arg Met Lys
  MISC_FEATURE (82)..(82): Xaa at this position is a single (one, 1) amino acid selected from the following options: Tyr Phe Glu
  MISC_FEATURE (83)..(83): Xaa at this position is a single (one, 1) amino acid selected from the following options: Leu Phe Pro Gln
  MISC_FEATURE (84)..(84): Xaa at this position is a single (one, 1) amino acid selected from the following options: Arg Leu Lys
  MISC_FEATURE (85)..(85): Xaa at this position is a single (one, 1) amino acid selected from the following options: Ala Lys Glu Thr Asp Gln Arg
  MISC_FEATURE (86)..(86): Xaa at this position is a single (one, 1) amino acid selected from the following options: Gln Arg Lys Ala Cys
  MISC_FEATURE (87)..(87): Xaa at this position is a single (one, 1) amino acid selected from the following options: Ser Thr Ala Asn Glu Leu
  MISC_FEATURE (88)..(88): Xaa at this position is a single (one, 1) amino acid selected from the following options: Arg Lys Gln His Ala
  MISC_FEATURE (89)..(89): Xaa at this position is a single (one, 1) amino acid selected from the following options: Glu Gln Lys
  MISC_FEATURE (90)..(90): Xaa at this position is a single (one, 1) amino acid selected from the following options: Gln Lys
  MISC_FEATURE (91)..(91): Xaa at this position is a single (one, 1) amino acid selected from the following options: Leu His Met Glu
  MISC_FEATURE (92)..(92): Xaa at this position is a single (one, 1) amino acid selected from the following options: Ala Leu Glu Thr Asp Ser
  MISC_FEATURE (93)..(93): Xaa at this position is a single (one, 1) amino acid selected from the following options: Ala Thr Arg Ile Ser Asn Val Met Asp
  MISC_FEATURE (94)..(94): Xaa at this position is a single (one, 1) amino acid selected from the following options: Leu Glu
  MISC_FEATURE (95)..(95): Xaa at this position is a single (one, 1) amino acid selected from the following options: Lys Arg Ile
  MISC_FEATURE (96)..(96): Xaa at this position is a single (one, 1) amino acid selected from the following options: Lys Asn Arg Thr Glu
HHHHHHDYKDDDDKXXXXXXRKKRRQRRRXXXXXXXMAXXXXXXXXXXXXXXXXXXXXXXXXXXXXXXXXXXXXXXXXXXXXXXXXXXXXXXXXXX

SEQ ID NO: 149 - protein, 95 aa, Artificial Sequence
  Designed; as detailed elsewhere in present application
  MISC_FEATURE (15)..(15): Xaa at this position is a single (one, 1) amino acid (or lack thereof) selected from the following options: Ala Val Leu Ile Gly Pro or absent (no amino acid at this position and so this position is not present)
  MISC_FEATURE (15)..(36): If adjacent residues are both cysteine, optionally they can be connected by a disulfide, instead of a peptide, bond
  MISC_FEATURE (16)..(16): Xaa at this position is a single (one, 1) amino acid (or lack thereof) selected from the following options: Cys Gly Pro or absent (no amino acid at this position and so this position is not present)
  MISC_FEATURE (17)..(17): Xaa at this position is a single (one, 1) amino acid (or lack thereof) selected from the following options: Cys Gly Pro or absent (no amino acid at this position and so this position is not present)
  MISC_FEATURE (18)..(18): Xaa at this position is a single (one, 1) amino acid (or lack thereof) selected from the following options: Ala Val Leu Ile Gly Pro Ala Val Leu Ile or absent (no amino acid at this position and so this position is not present)
  MISC_FEATURE (19)..(19): Xaa at this position is a single (one, 1) amino acid (or lack thereof) selected from the following options: Tyr Cys Gly Pro Ala Val Leu Ile or absent (no amino acid at this position and so this position is not present)
  MISC_FEATURE (20)..(20): Xaa at this position is a single (one, 1) amino acid (or lack thereof) selected from the following options: Gly Cys Pro Ala Val Leu Ile or absent (no amino acid at this position and so this position is not present)
  MISC_FEATURE (30)..(30): Xaa at this position is a single (one, 1) amino acid (or lack thereof) selected from the following options: Pro Cys Gly Ala Val Leu Ile or absent (no amino acid at this position and so this position is not present)
  MISC_FEATURE (31)..(31): Xaa at this position is a single (one, 1) amino acid (or lack thereof) selected from the following options: Pro Cys Gly Ala Val Leu Ile or absent (no amino acid at this position and so this position is not present)
  MISC_FEATURE (32)..(32): Xaa at this position is a single (one, 1) amino acid (or lack thereof) selected from the following options: Gln Cys Gly Pro Ala Val Leu Ile or absent (no amino acid at this position and so this position is not present)
  MISC_FEATURE (33)..(33): Xaa at this position is a single (one, 1) amino acid (or lack thereof) selected from the following options: Ala Val Leu Ile Gly Pro Ala Val Leu Ile or absent (no amino acid at this position and so this position is not present)
  MISC_FEATURE (34)..(34): Xaa at this position is a single (one, 1) amino acid (or lack thereof) selected from the following options: Cys Gly Pro Ala Val Leu Ile or absent (no amino acid at this position and so this position is not present)
  MISC_FEATURE (35)..(35): Xaa at this position is a single (one, 1) amino acid (or lack thereof) selected from the following options: Cys Gly Pro Ala Val Leu Ile or absent (no amino acid at this position and so this position is not present)
  MISC_FEATURE (36)..(36): Xaa at this position is a single (one, 1) amino acid (or lack thereof) selected from the following options: Ala Val Leu Ile Gly Pro Ala Val Leu Ile or absent (no amino acid at this position and so this position is not present)
  MISC_FEATURE (39)..(39): Xaa at this position is a single (one, 1) amino acid selected from the following options: Val Gly Ala Thr
  MISC_FEATURE (40)..(40): Xaa at this position is a single (one, 1) amino acid selected from the following options: Thr Ser Pro
  MISC_FEATURE (41)..(41): Xaa at this position is a single (one, 1) amino acid selected from the following options: Glu Ala Val
  MISC_FEATURE (42)..(42): Xaa at this position is a single (one, 1) amino acid selected from the following options: Leu Thr Gln
  MISC_FEATURE (43)..(43): Xaa at this position is a single (one, 1) amino acid selected from the following options: Ala Val
  MISC_FEATURE (44)..(44): Xaa at this position is a single (one, 1) amino acid selected from the following options: Ala Val Leu Ile Thr
  MISC_FEATURE (45)..(45): Xaa at this position is a single (one, 1) amino acid selected from the following options: Trp Arg Gln
  MISC_FEATURE (46)..(46): Xaa at this position is a single (one, 1) amino acid selected from the following options: Thr Val Met Ala Ser Leu
  MISC_FEATURE (47)..(47): Xaa at this position is a single (one, 1) amino acid selected from the following options: Gln Trp Arg
  MISC_FEATURE (48)..(48): Xaa at this position is a single (one, 1) amino acid selected from the following options: Leu Phe Gln
  MISC_FEATURE (49)..(49): Xaa at this position is a single (one, 1) amino acid selected from the following options: Arg Gly Tyr Cys Ala
  MISC_FEATURE (50)..(50): Xaa at this position is a single (one, 1) amino acid selected from the following options: Val Ser Ala Thr Met Arg
  MISC_FEATURE (51)..(51): Xaa at this position is a single (one, 1) amino acid selected from the following options: Trp Leu
  MISC_FEATURE (52)..(52): Xaa at this position is a single (one, 1) amino acid selected from the following options: Gly Ser
  MISC_FEATURE (53)..(53): Xaa at this position is a single (one, 1) amino acid selected from the following options: Val Ala Met
  MISC_FEATURE (54)..(54): Xaa at this position is a single (one, 1) amino acid selected from the following options: Arg Trp Lys Leu
  MISC_FEATURE (55)..(55): Xaa at this position is a single (one, 1) amino acid selected from the following options: Thr Ala Val Ser
  MISC_FEATURE (56)..(56): Xaa at this position is a single (one, 1) amino acid selected from the following options: Met Leu Ile Arg Val Ala Thr
  MISC_FEATURE (57)..(57): Xaa at this position is a single (one, 1) amino acid selected from the following options: Gln Arg
  MISC_FEATURE (58)..(58): Xaa at this position is a single (one, 1) amino acid selected from the following options: Ala Thr Gly Ser
  MISC_FEATURE (59)..(59): Xaa at this position is a single (one, 1) amino acid selected from the following options: Leu Arg Gln Gly
  MISC_FEATURE (60)..(60): Xaa at this position is a single (one, 1) amino acid selected from the following options: Gly Ser
  MISC_FEATURE (61)..(61): Xaa at this position is a single (one, 1) amino acid selected from the following options: Phe Tyr
  MISC_FEATURE (62)..(62): Xaa at this position is a single (one, 1) amino acid selected from the following options: Gly Pro Ala Val Leu Ile Met Cys Phe Tyr Trp His Lys Arg Gln Asn Glu Asp Ser Thr
  MISC_FEATURE (63)..(63): Xaa at this position is a single (one, 1) amino acid selected from the following options: Ile Val Leu Glu Phe
  MISC_FEATURE (64)..(64): Xaa at this position is a single (one, 1) amino acid selected from the following options: Trp Arg Lys Glu Thr Tyr
  MISC_FEATURE (65)..(65): Xaa at this position is a single (one, 1) amino acid selected from the following options: Asn Glu Asp Ala Lys Ser
  MISC_FEATURE (66)..(66): Xaa at this position is a single (one, 1) amino acid selected from the following options: Ala Arg Lys Cys
  MISC_FEATURE (67)..(67): Xaa at this position is a single (one, 1) amino acid selected from the following options: Gly Tyr Glu Pro
  MISC_FEATURE (68)..(68): Xaa at this position is a single (one, 1) amino acid selected from the following options: Val Gly Phe Lys Arg
  MISC_FEATURE (69)..(69): Xaa at this position is a single (one, 1) amino acid selected from the following options: Asp Ala Ser Arg Leu
  MISC_FEATURE (70)..(70): Xaa at this position is a single (one, 1) amino acid selected from the following options: Phe Leu Ile Glu Ser
  MISC_FEATURE (71)..(71): Xaa at this position is a single (one, 1) amino acid selected from the following options: Arg Gly Ala Ile Glu Ser Pro
  MISC_FEATURE (72)..(72): Xaa at this position is a single (one, 1) amino acid selected from the following options: Lys Arg Thr Glu Gln
  MISC_FEATURE (73)..(73): Xaa at this position is a single (one, 1) amino acid selected from the following options: Arg Lys Met
  MISC_FEATURE (74)..(74): Xaa at this position is a single (one, 1) amino acid selected from the following options: Gly Pro Ala Val Leu Ile Met Cys Phe Tyr Trp His Lys Arg Gln Asn Glu Asp Ser Thr
  MISC_FEATURE (75)..(75): Xaa at this position is a single (one, 1) amino acid selected from the following options: Gln Ala Lys Arg Pro Phe Val
  MISC_FEATURE (76)..(76): Xaa at this position is a single (one, 1) amino acid selected from the following options: Ala Ser Arg
  MISC_FEATURE (77)..(77): Xaa at this position is a single (one, 1) amino acid selected from the following options: Lys Glu Asp His Ala Ile
  MISC_FEATURE (78)..(78): Xaa at this position is a single (one, 1) amino acid selected from the following options: Gly Glu Pro Arg
  MISC_FEATURE (79)..(79): Xaa at this position is a single (one, 1) amino acid selected from the following options: Glu Asp Tyr Thr Gln
  MISC_FEATURE (80)..(80): Xaa at this position is a single (one, 1) amino acid selected from the following options: Arg Met Lys
  MISC_FEATURE (81)..(81): Xaa at this position is a single (one, 1) amino acid selected from the following options: Tyr Phe Glu
  MISC_FEATURE (82)..(82): Xaa at this position is a single (one, 1) amino acid selected from the following options: Leu Phe Pro Gln
  MISC_FEATURE (83)..(83): Xaa at this position is a single (one, 1) amino acid selected from the following options: Arg Leu Lys
  MISC_FEATURE (84)..(84): Xaa at this position is a single (one, 1) amino acid selected from the following options: Ala Lys Glu Thr Asp Gln Arg
  MISC_FEATURE (85)..(85): Xaa at this position is a single (one, 1) amino acid selected from the following options: Gln Arg Lys Ala Cys
  MISC_FEATURE (86)..(86): Xaa at this position is a single (one, 1) amino acid selected from the following options: Ser Thr Ala Asn Glu Leu
  MISC_FEATURE (87)..(87): Xaa at this position is a single (one, 1) amino acid selected from the following options: Arg Lys Gln His Ala
  MISC_FEATURE (88)..(88): Xaa at this position is a single (one, 1) amino acid selected from the following options: Glu Gln Lys
  MISC_FEATURE (89)..(89): Xaa at this position is a single (one, 1) amino acid selected from the following options: Gln Lys
  MISC_FEATURE (90)..(90): Xaa at this position is a single (one, 1) amino acid selected from the following options: Leu His Met Glu
  MISC_FEATURE (91)..(91): Xaa at this position is a single (one, 1) amino acid selected from the following options: Ala Leu Glu Thr Asp Ser
  MISC_FEATURE (92)..(92): Xaa at this position is a single (one, 1) amino acid selected from the following options: Ala Thr Arg Ile Ser Asn Val Met Asp
  MISC_FEATURE (93)..(93): Xaa at this position is a single (one, 1) amino acid selected from the following options: Leu Glu
  MISC_FEATURE (94)..(94): Xaa at this position is a single (one, 1) amino acid selected from the following options: Lys Arg Ile
  MISC_FEATURE (95)..(95): Xaa at this position is a single (one, 1) amino acid selected from the following options: Lys Asn Arg Thr Glu
HHHHHHDYKDDDDKXXXXXXRKKRRQRRRXXXXXXXMAXXXXXXXXXXXXXXXXXXXXXXXXXXXXXXXXXXXXXXXXXXXXXXXXXXXXXXXXX

SEQ ID NO: 150 - protein, 78 aa, Artificial Sequence
  Designed; as detailed elsewhere in present application
  MISC_FEATURE (15)..(15): Xaa at this position is a single (one, 1) amino acid (or lack thereof) selected from the following options: Ala Val Leu Ile Gly Pro or absent (no amino acid at this position and so this position is not present)
  MISC_FEATURE (15)..(36): If adjacent residues are both cysteine, optionally they can be connected by a disulfide, instead of a peptide, bond
  MISC_FEATURE (16)..(16): Xaa at this position is a single (one, 1) amino acid (or lack thereof) selected from the following options: Cys Gly Pro or absent (no amino acid at this position and so this position is not present)
  MISC_FEATURE (17)..(17): Xaa at this position is a single (one, 1) amino acid (or lack thereof) selected from the following options: Cys Gly Pro or absent (no amino acid at this position and so this position is not present)
  MISC_FEATURE (18)..(18): Xaa at this position is a single (one, 1) amino acid (or lack thereof) selected from the following options: Ala Val Leu Ile Gly Pro Ala Val Leu Ile or absent (no amino acid at this position and so this position is not present)
  MISC_FEATURE (19)..(19): Xaa at this position is a single (one, 1) amino acid (or lack thereof) selected from the following options: Tyr Cys Gly Pro Ala Val Leu Ile or absent (no amino acid at this position and so this position is not present)
  MISC_FEATURE (20)..(20): Xaa at this position is a single (one, 1) amino acid (or lack thereof) selected from the following options: Gly Cys Pro Ala Val Leu Ile or absent (no amino acid at this position and so this position is not present)
  MISC_FEATURE (30)..(30): Xaa at this position is a single (one, 1) amino acid (or lack thereof) selected from the following options: Pro Cys Gly Ala Val Leu Ile or absent (no amino acid at this position and so this position is not present)
  MISC_FEATURE (31)..(31): Xaa at this position is a single (one, 1) amino acid (or lack thereof) selected from the following options: Pro Cys Gly Ala Val Leu Ile or absent (no amino acid at this position and so this position is not present)
  MISC_FEATURE (32)..(32): Xaa at this position is a single (one, 1) amino acid (or lack thereof) selected from the following options: Gln Cys Gly Pro Ala Val Leu Ile or absent (no amino acid at this position and so this position is not present)
  MISC_FEATURE (33)..(33): Xaa at this position is a single (one, 1) amino acid (or lack thereof) selected from the following options: Gln Cys Gly Pro Ala Val Leu Ile or absent (no amino acid at this position and so this position is not present)
  MISC_FEATURE (34)..(34): Xaa at this position is a single (one, 1) amino acid (or lack thereof) selected from the following options: Cys Gly Pro Ala Val Leu Ile or absent (no amino acid at this position and so this position is not present)
  MISC_FEATURE (35)..(35): Xaa at this position is a single (one, 1) amino acid (or lack thereof) selected from the following options: Cys Gly Pro Ala Val Leu Ile or absent (no amino acid at this position and so this position is not present)
  MISC_FEATURE (36)..(36): Xaa at this position is a single (one, 1) amino acid (or lack thereof) selected from the following options: Ala Val Leu Ile Gly Pro Ala Val Leu Ile or absent (no amino acid at this position and so this position is not present)
  MISC_FEATURE (39)..(39): Xaa at this position is a single (one, 1) amino acid selected from the following options: Val Gly Ala Thr
  MISC_FEATURE (40)..(40): Xaa at this position is a single (one, 1) amino acid selected from the following options: Thr Ser Pro
  MISC_FEATURE (41)..(41): Xaa at this position is a single (one, 1) amino acid selected from the following options: Glu Ala Val
  MISC_FEATURE (42)..(42): Xaa at this position is a single (one, 1) amino acid selected from the following options: Leu Thr Gln
  MISC_FEATURE (43)..(43): Xaa at this position is a single (one, 1) amino acid selected from the following options: Ala Val
  MISC_FEATURE (44)..(44): Xaa at this position is a single (one, 1) amino acid selected from the following options: Ala Val Leu Ile Thr
  MISC_FEATURE (45)..(45): Xaa at this position is a single (one, 1) amino acid selected from the following options: Trp Arg Gln
  MISC_FEATURE (46)..(46): Xaa at this position is a single (one, 1) amino acid selected from the following options: Thr Val Met Ala Ser Leu
  MISC_FEATURE (47)..(47): Xaa at this position is a single (one, 1) amino acid selected from the following options: Gln Trp Arg
  MISC_FEATURE (48)..(48): Xaa at this position is a single (one, 1) amino acid selected from the following options: Leu Phe Gln
  MISC_FEATURE (49)..(49): Xaa at this position is a single (one, 1) amino acid selected from the following options: Arg Gly Tyr Cys Ala
  MISC_FEATURE (50)..(50): Xaa at this position is a single (one, 1) amino acid selected from the following options: Val Ser Ala Thr Met Arg
  MISC_FEATURE (51)..(51): Xaa at this position is a single (one, 1) amino acid selected from the following options: Trp Leu
  MISC_FEATURE (52)..(52): Xaa at this position is a single (one, 1) amino acid selected from the following options: Gly Ser
  MISC_FEATURE (53)..(53): Xaa at this position is a single (one, 1) amino acid selected from the following options: Val Ala Met
  MISC_FEATURE (54)..(54): Xaa at this position is a single (one, 1) amino acid selected from the following options: Arg Trp Lys Leu
  MISC_FEATURE (55)..(55): Xaa at this position is a single (one, 1) amino acid selected from the following options: Thr Ala Val Ser
  MISC_FEATURE (56)..(56): Xaa at this position is a single (one, 1) amino acid selected from the following options: Met Leu Ile Arg Val Ala Thr
  MISC_FEATURE (57)..(57): Xaa at this position is a single (one, 1) amino acid selected from the following options: Gln Arg
  MISC_FEATURE (58)..(58): Xaa at this position is a single (one, 1) amino acid selected from the following options: Ala Thr Gly Ser
  MISC_FEATURE (59)..(59): Xaa at this position is a single (one, 1) amino acid selected from the following options: Leu Arg Gln Gly
  MISC_FEATURE (60)..(60): Xaa at this position is a single (one, 1) amino acid selected from the following options: Gly Ser
  MISC_FEATURE (61)..(61): Xaa at this position is a single (one, 1) amino acid selected from the following options: Phe Tyr
  MISC_FEATURE (62)..(62): Xaa at this position is a single (one, 1) amino acid selected from the following options: Leu His Met Glu
  MISC_FEATURE (63)..(63): Xaa at this position is a single (one, 1) amino acid selected from the following options: Ala Leu Glu Thr Asp Ser
  MISC_FEATURE (64)..(64): Xaa at this position is a single (one, 1) amino acid selected from the following options: Ala Thr Arg Ile Ser Asn Val Met Asp
  MISC_FEATURE (65)..(65): Xaa at this position is a single (one, 1) amino acid selected from the following options: Leu Glu
  MISC_FEATURE (66)..(66): Xaa at this position is a single (one, 1) amino acid selected from the following options: Lys Arg Ile
  MISC_FEATURE (67)..(67): Xaa at this position is a single (one, 1) amino acid selected from the following options: Lys Asn Arg Thr Glu
  MISC_FEATURE (68)..(68): Xaa at this position is a single (one, 1) amino acid selected from the following options: Gly Pro Ala Val Leu Ile Met Cys Phe Tyr Trp His Lys Arg Gln Asn Glu Asp Ser Thr
  MISC_FEATURE (69)..(69): Xaa at this position is a single (one, 1) amino acid selected from the following options: Gly Pro Ala Val Leu Ile Met Cys Phe Tyr Trp His Lys Arg Gln Asn Glu Asp Ser Thr
  MISC_FEATURE (70)..(70): Xaa at this position is a single (one, 1) amino acid selected from the following options: Glu Gln Lys Val
  MISC_FEATURE (71)..(71): Xaa at this position is a single (one, 1) amino acid selected from the following options: Glu Asp Asn Lys
  MISC_FEATURE (72)..(72): Xaa at this position is a single (one, 1) amino acid selected from the following options: Glu Val
  MISC_FEATURE (73)..(73): Xaa at this position is a single (one, 1) amino acid selected from the following options: Ile Val
  MISC_FEATURE (74)..(74): Xaa at this position is a single (one, 1) amino acid selected from the following options: Val Thr Ser Asp Asn Gly Ala Glu Gln Tyr Arg
  MISC_FEATURE (75)..(75): Xaa at this position is a single (one, 1) amino acid selected from the following options: His Val Tyr Ala
  MISC_FEATURE (76)..(76): Xaa at this position is a single (one, 1) amino acid selected from the following options: Gly Pro Ala Val Leu Ile Met Cys Phe Tyr Trp His Lys Arg Gln Asn Glu Asp Ser Thr
  MISC_FEATURE (77)..(77): Xaa at this position is a single (one, 1) amino acid selected from the following options: Gly Pro Ala Val Leu Ile Met Cys Phe Tyr Trp His Lys Arg Gln Asn Glu Asp Ser Thr
  MISC_FEATURE (78)..(78): Xaa at this position is a single (one, 1) amino acid selected from the following options: Lys Glu Gln Arg Gly
HHHHHHDYKDDDDKXXXXXXRKKRRQRRRXXXXXXXMAXXXXXXXXXXXXXXXXXXXXXXXXXXXXXXXXXXXXXXXX

SEQ ID NO: 151 - protein, 152 aa, Artificial Sequence
  Designed; as detailed elsewhere in present application
  MISC_FEATURE (15)..(15): Xaa at this position is a single (one, 1) amino acid (or lack thereof) selected from the following options: Ala Val Leu Ile Gly Pro or absent (no amino acid at this position and so this position is not present)
  MISC_FEATURE (15)..(67): If adjacent residues are both cysteine, optionally they can be connected by a disulfide, instead of a peptide, bond
  MISC_FEATURE (16)..(16): Xaa at this position is a single (one, 1) amino acid (or lack thereof) selected from the following options: Cys Gly Pro or absent (no amino acid at this position and so this position is not present)
  MISC_FEATURE (17)..(17): Xaa at this position is a single (one, 1) amino acid (or lack thereof) selected from the following options: Cys Gly Pro or absent (no amino acid at this position and so this position is not present)
  MISC_FEATURE (18)..(18): Xaa at this position is a single (one, 1) amino acid (or lack thereof) selected from the following options: Ala Val Leu Ile Gly Pro or absent (no amino acid at this position and so this position is not present)
  MISC_FEATURE (24)..(67): Xaa is a single (one, 1) amino acid (or lack thereof) INDEPENDENTLY selected for each of these positions from the following options: Arg Cys Gly Pro Ala Val Leu Ile or absent (no amino acid at this position and so this position is not present)
  MISC_FEATURE (70)..(70): Xaa at this position is a single (one, 1) amino acid selected from the following options: Val Gly Ala Thr
  MISC_FEATURE (71)..(71): Xaa at this position is a single (one, 1) amino acid selected from the following options: Thr Ser Pro
  MISC_FEATURE (72)..(72): Xaa at this position is a single (one, 1) amino acid selected from the following options: Glu Ala Val
  MISC_FEATURE (73)..(73): Xaa at this position is a single (one, 1) amino acid selected from the following options: Leu Thr Gln
  MISC_FEATURE (74)..(74): Xaa at this position is a single (one, 1) amino acid selected from the following options: Ala Val
  MISC_FEATURE (75)..(75): Xaa at this position is a single (one, 1) amino acid selected from the following options: Ala Val Leu Ile Thr
  MISC_FEATURE (76)..(76): Xaa at this position is a single (one, 1) amino acid selected from the following options: Trp Arg Gln
  MISC_FEATURE (77)..(77): Xaa at this position is a single (one, 1) amino acid selected from the following options: Thr Val Met Ala Ser Leu
  MISC_FEATURE (78)..(78): Xaa at this position is a single (one, 1) amino acid selected from the following options: Gln Trp Arg
  MISC_FEATURE (79)..(79): Xaa at this position is a single (one, 1) amino acid selected from the following options: Leu Phe Gln
  MISC_FEATURE (80)..(80): Xaa at this position is a single (one, 1) amino acid selected from the following options: Arg Gly Tyr Cys Ala
  MISC_FEATURE (81)..(81): Xaa at this position is a single (one, 1) amino acid selected from the following options: Val Ser Ala Thr Met Arg
  MISC_FEATURE (82)..(82): Xaa at this position is a single (one, 1) amino acid selected from the following options: Trp Leu
  MISC_FEATURE (83)..(83): Xaa at this position is a single (one, 1) amino acid selected from the following options: Gly Ser
  MISC_FEATURE (84)..(84): Xaa at this position is a single (one, 1) amino acid selected from the following options: Val Ala Met
  MISC_FEATURE (85)..(85): Xaa at this position is a single (one, 1) amino acid selected from the following options: Arg Trp Lys Leu
  MISC_FEATURE (86)..(86): Xaa at this position is a single (one, 1) amino acid selected from the following options: Thr Ala Val Ser
  MISC_FEATURE (87)..(87): Xaa at this position is a single (one, 1) amino acid selected from the following options: Met Leu Ile Arg Val Ala Thr
  MISC_FEATURE (88)..(88): Xaa at this position is a single (one, 1) amino acid selected from the following options: Gln Arg
  MISC_FEATURE (89)..(89): Xaa at this position is a single (one, 1) amino acid selected from the following options: Ala Thr Gly Ser
  MISC_FEATURE (90)..(90): Xaa at this position is a single (one, 1) amino acid selected from the following options: Leu Arg Gln Gly
  MISC_FEATURE (91)..(91): Xaa at this position is a single (one, 1) amino acid selected from the following options: Gly Ser
  MISC_FEATURE (92)..(92): Xaa at this position is a single (one, 1) amino acid selected from the following options: Phe Tyr
  MISC_FEATURE (93)..(93): Xaa at this position is a single (one, 1) amino acid selected from the following options: Gly Ser Val Ala Thr Leu Arg Phe Ile Lys Met Gln Asn
  MISC_FEATURE (94)..(94): Xaa at this position is a single (one, 1) amino acid selected from the following options: Ser Cys Arg Gly Phe Thr Pro
  MISC_FEATURE (95)..(95): Xaa at this position is a single (one, 1) amino acid selected from the following options: Asp Glu Gly Ser Phe Lys Thr Leu Phe Pro
  MISC_FEATURE (96)..(96): Xaa at this position is a single (one, 1) amino acid selected from the following options: Pro Gln Arg Ser Thr Lys Gly Glu Ala Phe
  MISC_FEATURE (97)..(97): Xaa at this position is a single (one, 1) amino acid selected from the following options: Ser Pro Ala Gly Arg Glu Asp Val
  MISC_FEATURE (98)..(98): Xaa at this position is a single (one, 1) amino acid selected from the following options: Glu Asp Lys His Ala Gly Asn Ser Arg Gln Asp Thr Leu Val
  MISC_FEATURE (99)..(99): Xaa at this position is a single (one, 1) amino acid selected from the following options: Asn Asp Tyr Ser Gly Arg His Lys Glu Ala Leu
  MISC_FEATURE (100)..(100): Xaa at this position is a single (one, 1) amino acid selected from the following options: Val Leu Pro His Met Ile Phe Thr Gly Gly Ser Asp Glu Phe
  MISC_FEATURE (101)..(101): Xaa at this position is a single (one, 1) amino acid selected from the following options: Asp Gly His Arg Ser Glu Pro
  MISC_FEATURE (102)..(102): Xaa at this position is a single (one, 1) amino acid selected from the following options: Arg Ser Gly Thr Pro Ala Lys Glu
  MISC_FEATURE (103)..(103): Xaa at this position is a single (one, 1) amino acid selected from the following options: Arg Thr Gly Ser Arg Pro Lys Asp Ala
  MISC_FEATURE (104)..(104): Xaa at this position is a single (one, 1) amino acid selected from the following options: Ala Glu Ser Gly Arg
  MISC_FEATURE (105)..(105): Xaa at this position is a single (one, 1) amino acid selected from the following options: Ala Gly Gln Pro
  MISC_FEATURE (106)..(106): Xaa at this position is a single (one, 1) amino acid selected from the following options: Gly Pro Ala Val Leu Ile Met Cys Phe Tyr Trp His Lys Arg Gln Asn Glu Asp Ser Thr
  MISC_FEATURE (107)..(107): Xaa at this position is a single (one, 1) amino acid selected from the following options: Ile Val Leu Glu Phe
  MISC_FEATURE (108)..(108): Xaa at this position is a single (one, 1) amino acid selected from the following options: Trp Arg Lys Glu Thr Tyr
  MISC_FEATURE (109)..(109): Xaa at this position is a single (one, 1) amino acid selected from the following options: Asn Glu Asp Ala Lys Ser
  MISC_FEATURE (110)..(110): Xaa at this position is a single (one, 1) amino acid selected from the following options: Ala Arg Lys Cys
  MISC_FEATURE (111)..(111): Xaa at this position is a single (one, 1) amino acid selected from the following options: Gly Tyr Glu Pro
  MISC_FEATURE (112)..(112): Xaa at this position is a single (one, 1) amino acid selected from the following options: Val Gly Phe Lys Arg
  MISC_FEATURE (113)..(113): Xaa at this position is a single (one, 1) amino acid selected from the following options: Asp Ala Ser Arg Leu
  MISC_FEATURE (114)..(114): Xaa at this position is a single (one, 1) amino acid selected from the following options: Phe Leu Ile Glu Ser
  MISC_FEATURE (115)..(115): Xaa at this position is a single (one, 1) amino acid selected from the following options: Arg Gly Ala Ile Glu Ser Pro
  MISC_FEATURE (116)..(116): Xaa at this position is a single (one, 1) amino acid selected from the following options: Lys Arg Thr Glu Gln
  MISC_FEATURE (117)..(117): Xaa at this position is a single (one, 1) amino acid selected from the following options: Arg Lys Met
  MISC_FEATURE (118)..(118): Xaa at this position is a single (one, 1) amino acid selected from the following options: Gly Pro Ala Val Leu Ile Met Cys Phe Tyr Trp His Lys Arg Gln Asn Glu Asp Ser Thr
  MISC_FEATURE (119)..(119): Xaa at this position is a single (one, 1) amino acid selected from the following options: Gln Ala Lys Arg Pro Phe Val
  MISC_FEATURE (120)..(120): Xaa at this position is a single (one, 1) amino acid selected from the following options: Ala Ser Arg
  MISC_FEATURE (121)..(121): Xaa at this position is a single (one, 1) amino acid selected from the following options: Lys Glu Asp His Ala Ile
  MISC_FEATURE (122)..(122): Xaa at this position is a single (one, 1) amino acid selected from the following options: Gly Glu Pro Arg
  MISC_FEATURE (123)..(123): Xaa at this position is a single (one, 1) amino acid selected from the following options: Glu Asp Tyr Thr Gln
  MISC_FEATURE (124)..(124): Xaa at this position is a single (one, 1) amino acid selected from the following options: Arg Met Lys
  MISC_FEATURE (125)..(125): Xaa at this position is a single (one, 1) amino acid selected from the following options: Tyr Phe Glu
  MISC_FEATURE (126)..(126): Xaa at this position is a single (one, 1) amino acid selected from the following options: Leu Phe Pro Gln
  MISC_FEATURE (127)..(127): Xaa at this position is a single (one, 1) amino acid selected from the following options: Arg Leu Lys
  MISC_FEATURE (128)..(128): Xaa at this position is a single (one, 1) amino acid selected from the following options: Ala Lys Glu Thr Asp Gln Arg
  MISC_FEATURE (129)..(129): Xaa at this position is a single (one, 1) amino acid selected from the following options: Gln Arg Lys Ala Cys
  MISC_FEATURE (130)..(130): Xaa at this position is a single (one, 1) amino acid selected from the following options: Ser Thr Ala Asn Glu Leu
  MISC_FEATURE (131)..(131): Xaa at this position is a single (one, 1) amino acid selected from the following options: Arg Lys Gln His Ala
  MISC_FEATURE (132)..(132): Xaa at this position is a single (one, 1) amino acid selected from the following options: Glu Gln Lys
  MISC_FEATURE (133)..(133): Xaa at this position is a single (one, 1) amino acid selected from the following options: Gln Lys
  MISC_FEATURE (134)..(134): Xaa at this position is a single (one, 1) amino acid selected from the following options: Leu His Met Glu
  MISC_FEATURE (135)..(135): Xaa at this position is a single (one, 1) amino acid selected from the following options: Ala Leu Glu Thr Asp Ser
  MISC_FEATURE (136)..(136): Xaa at this position is a single (one, 1) amino acid selected from the following options: Ala Thr Arg Ile Ser Asn Val Met Asp
  MISC_FEATURE (137)..(137): Xaa at this position is a single (one, 1) amino acid selected from the following options: Leu Glu
  MISC_FEATURE (138)..(138): Xaa at this position is a single (one, 1) amino acid selected from the following options: Lys Arg Ile
  MISC_FEATURE (139)..(139): Xaa at this position is a single (one, 1) amino acid selected from the following options: Lys Asn Arg Thr Glu
  MISC_FEATURE (140)..(140): Xaa at this position is a single (one, 1) amino acid selected from the following options: Gly Pro Ala Val Leu Ile Met Cys Phe Tyr Trp His Lys Arg Gln Asn Glu Asp Ser Thr
  MISC_FEATURE (141)..(141): Xaa at this position is a single (one, 1) amino acid selected from the following options: Gly Pro Ala Val Leu Ile Met Cys Phe Tyr Trp His Lys Arg Gln Asn Glu Asp Ser Thr
  MISC_FEATURE (142)..(142): Xaa at this position is a single (one, 1) amino acid selected from the following options: Glu Gln Lys Val
  MISC_FEATURE (143)..(143): Xaa at this position is a single (one, 1) amino acid selected from the following options: Glu Asp Asn Lys
  MISC_FEATURE (144)..(144): Xaa at this position is a single (one, 1) amino acid selected from the following options: Glu Val
  MISC_FEATURE (145)..(145): Xaa at this position is a single (one, 1) amino acid selected from the following options: Ile Val
  MISC_FEATURE (146)..(146): Xaa at this position is a single (one, 1) amino acid selected from the following options: Val Thr Ser Asp Asn Gly Ala Glu Gln Tyr Arg
  MISC_FEATURE (147)..(147): Xaa at this position is a single (one, 1) amino acid selected from the following options: Gly Pro Ala Val Leu Ile Met Cys Phe Tyr Trp His Lys Arg Gln Asn Glu Asp Ser Thr
  MISC_FEATURE (148)..(148): Xaa at this position is a single (one, 1) amino acid selected from the following options: Gly Pro Ala Val Leu Ile Met Cys Phe Tyr Trp His Lys Arg Gln Asn Glu Asp Ser Thr
  MISC_FEATURE (149)..(149): Xaa at this position is a single (one, 1) amino acid selected from the following options: Lys Ser Met Val His Ala Arg Gln Glu Ile Leu Val
  MISC_FEATURE (150)..(150): Xaa at this position is a single (one, 1) amino acid selected from the following options: Lys Glu Gln Arg Gly
  MISC_FEATURE (151)..(151): Xaa at this position is a single (one, 1) amino acid selected from the following options: Glu Ala Gln
HHHHHHDYKDDDDKXXXXRRRRRXXXXXXXXXXXXXXXXXXXXXXXXXXXXXXXXXXXXXXXXXXXXMAXXXXXXXXXXXXXXXXXXXXXXXXXXXXXXXXXXXXXXXXXXXXXXXXXXXXXXXXXXXXXXXXXXXXXXXXXXXXXXXXXXI

SEQ ID NO: 152 - protein, 143 aa, Artificial Sequence
  Designed; as detailed elsewhere in present application
  MISC_FEATURE (15)..(15): Xaa at this position is a single (one, 1) amino acid (or lack thereof) selected from the following options: Ala Val Leu Ile Gly Pro or absent (no amino acid at this position and so this position is not present)
  MISC_FEATURE (15)..(67): If adjacent residues are both cysteine, optionally they can be connected by a disulfide, instead of a peptide, bond
  MISC_FEATURE (16)..(16): Xaa at this position is a single (one, 1) amino acid (or lack thereof) selected from the following options: Cys Gly Pro or absent (no amino acid at this position and so this position is not present)
  MISC_FEATURE (17)..(17): Xaa at this position is a single (one, 1) amino acid (or lack thereof) selected from the following options: Cys Gly Pro or absent (no amino acid at this position and so this position is not present)
  MISC_FEATURE (18)..(18): Xaa at this position is a single (one, 1) amino acid (or lack thereof) selected from the following options: Ala Val Leu Ile Gly Pro or absent (no amino acid at this position and so this position is not present)
  MISC_FEATURE (24)..(67): Xaa is a single (one, 1) amino acid (or lack thereof) INDEPENDENTLY selected for each of these positions from the following options: Arg Cys Gly Pro Ala Val Leu Ile or absent (no amino acid at this position and so this position is not present)
  MISC_FEATURE (70)..(70): Xaa at this position is a single (one, 1) amino acid selected from the following options: Val Gly Ala Thr
  MISC_FEATURE (71)..(71): Xaa at this position is a single (one, 1) amino acid selected from the following options: Thr Ser Pro
  MISC_FEATURE (72)..(72): Xaa at this position is a single (one, 1) amino acid selected from the following options: Glu Ala Val
  MISC_FEATURE (73)..(73): Xaa at this position is a single (one, 1) amino acid selected from the following options: Leu Thr Gln
  MISC_FEATURE (74)..(74): Xaa at this position is a single (one, 1) amino acid selected from the following options: Ala Val
  MISC_FEATURE (75)..(75): Xaa at this position is a single (one, 1) amino acid selected from the following options: Ala Val Leu Ile Thr
  MISC_FEATURE (76)..(76): Xaa at this position is a single (one, 1) amino acid selected from the following options: Trp Arg Gln
  MISC_FEATURE (77)..(77): Xaa at this position is a single (one, 1) amino acid selected from the following options: Thr Val Met Ala Ser Leu
  MISC_FEATURE (78)..(78): Xaa at this position is a single (one, 1) amino acid selected from the following options: Gln Trp Arg
  MISC_FEATURE (79)..(79): Xaa at this position is a single (one, 1) amino acid selected from the following options: Leu Phe Gln
  MISC_FEATURE (80)..(80): Xaa at this position is a single (one, 1) amino acid selected from the following options: Arg Gly Tyr Cys Ala
  MISC_FEATURE (81)..(81): Xaa at this position is a single (one, 1) amino acid selected from the following options: Val Ser Ala Thr Met Arg
  MISC_FEATURE (82)..(82): Xaa at this position is a single (one, 1) amino acid selected from the following options: Trp Leu
  MISC_FEATURE (83)..(83): Xaa at this position is a single (one, 1) amino acid selected from the following options: Gly Ser
  MISC_FEATURE (84)..(84): Xaa at this position is a single (one, 1) amino acid selected from the following options: Val Ala Met
  MISC_FEATURE (85)..(85): Xaa at this position is a single (one, 1) amino acid selected from the following options: Arg Trp Lys Leu
  MISC_FEATURE (86)..(86): Xaa at this position is a single (one, 1) amino acid selected from the following options: Thr Ala Val Ser
  MISC_FEATURE (87)..(87): Xaa at this position is a single (one, 1) amino acid selected from the following options: Met Leu Ile Arg Val Ala Thr
  MISC_FEATURE (88)..(88): Xaa at this position is a single (one, 1) amino acid selected from the following options: Gln Arg
  MISC_FEATURE (89)..(89): Xaa at this position is a single (one, 1) amino acid selected from the following options: Ala Thr Gly Ser
  MISC_FEATURE (90)..(90): Xaa at this position is a single (one, 1) amino acid selected from the following options: Leu Arg Gln Gly
  MISC_FEATURE (91)..(91): Xaa at this position is a single (one, 1) amino acid selected from the following options: Gly Ser
  MISC_FEATURE (92)..(92): Xaa at this position is a single (one, 1) amino acid selected from the following options: Phe Tyr
  MISC_FEATURE (93)..(93): Xaa at this position is a single (one, 1) amino acid selected from the following options: Arg Ser Gly Thr Pro Ala Lys Glu
  MISC_FEATURE (94)..(94): Xaa at this position is a single (one, 1) amino acid selected from the following options: Arg Thr Gly Ser Arg Pro Lys Asp Ala
  MISC_FEATURE (95)..(95): Xaa at this position is a single (one, 1) amino acid selected from the following options: Ala Glu Ser Gly Arg
  MISC_FEATURE (96)..(96): Xaa at this position is a single (one, 1) amino acid selected from the following options: Ala Gly Gln Pro
  MISC_FEATURE (97)..(97): Xaa at this position is a single (one, 1) amino acid selected from the following options: Gly Pro Ala Val Leu Ile Met Cys Phe Tyr Trp His Lys Arg Gln Asn Glu Asp Ser Thr
  MISC_FEATURE (98)..(98): Xaa at this position is a single (one, 1) amino acid selected from the following options: Ile Val Leu Glu Phe
  MISC_FEATURE (99)..(99): Xaa at this position is a single (one, 1) amino acid selected from the following options: Trp Arg Lys Glu Thr Tyr
  MISC_FEATURE (100)..(100): Xaa at this position is a single (one, 1) amino acid selected from the following options: Asn Glu Asp Ala Lys Ser
  MISC_FEATURE (101)..(101): Xaa at this position is a single (one, 1) amino acid selected from the following options: Ala Arg Lys Cys
  MISC_FEATURE (102)..(102): Xaa at this position is a single (one, 1) amino acid selected from the following options: Gly Tyr Glu Pro
  MISC_FEATURE (103)..(103): Xaa at this position is a single (one, 1) amino acid selected from the following options: Val Gly Phe Lys Arg
  MISC_FEATURE (104)..(104): Xaa at this position is a single (one, 1) amino acid selected from the following options: Asp Ala Ser Arg Leu
  MISC_FEATURE (105)..(105): Xaa at this position is a single (one, 1) amino acid selected from the following options: Phe Leu Ile Glu Ser
  MISC_FEATURE (106)..(106): Xaa at this position is a single (one, 1) amino acid selected from the following options: Arg Gly Ala Ile Glu Ser Pro
  MISC_FEATURE (107)..(107): Xaa at this position is a single (one, 1) amino acid selected from the following options: Lys Arg Thr Glu Gln
  MISC_FEATURE (108)..(108): Xaa at this position is a single (one, 1) amino acid selected from the following options: Arg Lys Met
  MISC_FEATURE (109)..(109): Xaa at this position is a single (one, 1) amino acid selected from the following options: Gly Pro Ala Val Leu Ile Met Cys Phe Tyr Trp His Lys Arg Gln Asn Glu Asp Ser Thr
  MISC_FEATURE (110)..(110): Xaa at this position is a single (one, 1) amino acid selected from the following options: Gln Ala Lys Arg Pro Phe Val
  MISC_FEATURE (111)..(111): Xaa at this position is a single (one, 1) amino acid selected from the following options: Ala Ser Arg
  MISC_FEATURE (112)..(112): Xaa at this position is a single (one, 1) amino acid selected from the following options: Lys Glu Asp His Ala Ile
  MISC_FEATURE (113)..(113): Xaa at this position is a single (one, 1) amino acid selected from the following options: Gly Glu Pro Arg
  MISC_FEATURE (114)..(114): Xaa at this position is a single (one, 1) amino acid selected from the following options: Glu Asp Tyr Thr Gln
  MISC_FEATURE (115)..(115): Xaa at this position is a single (one, 1) amino acid selected from the following options: Arg Met Lys
  MISC_FEATURE (116)..(116): Xaa at this position is a single (one, 1) amino acid selected from the following options: Tyr Phe Glu
  MISC_FEATURE (117)..(117): Xaa at this position is a single (one, 1) amino acid selected from the following options: Leu Phe Pro Gln
  MISC_FEATURE (118)..(118): Xaa at this position is a single (one, 1) amino acid selected from the following options: Arg Leu Lys
  MISC_FEATURE (119)..(119): Xaa at this position is a single (one, 1) amino acid selected from the following options: Ala Lys Glu Thr Asp Gln Arg
  MISC_FEATURE (120)..(120): Xaa at this position is a single (one, 1) amino acid selected from the following options: Gln Arg Lys Ala Cys
  MISC_FEATURE (121)..(121): Xaa at this position is a single (one, 1) amino acid selected from the following options: Ser Thr Ala Asn Glu Leu
  MISC_FEATURE (122)..(122): Xaa at this position is a single (one, 1) amino acid selected from the following options: Arg Lys Gln His Ala
  MISC_FEATURE (123)..(123): Xaa at this position is a single (one, 1) amino acid selected from the following options: Glu Gln Lys
  MISC_FEATURE (124)..(124): Xaa at this position is a single (one, 1) amino acid selected from the following options: Gln Lys
  MISC_FEATURE (125)..(125): Xaa at this position is a single (one, 1) amino acid selected from the following options: Leu His Met Glu
  MISC_FEATURE (126)..(126): Xaa at this position is a single (one, 1) amino acid selected from the following options: Ala Leu Glu Thr Asp Ser
  MISC_FEATURE (127)..(127): Xaa at this position is a single (one, 1) amino acid selected from the following options: Ala Thr Arg Ile Ser Asn Val Met Asp
  MISC_FEATURE (128)..(128): Xaa at this position is a single (one, 1) amino acid selected from the following options: Leu Glu
  MISC_FEATURE (129)..(129): Xaa at this position is a single (one, 1) amino acid selected from the following options: Lys Arg Ile
  MISC_FEATURE (130)..(130): Xaa at this position is a single (one, 1) amino acid selected from the following options: Lys Asn Arg Thr Glu
  MISC_FEATURE (131)..(131): Xaa at this position is a single (one, 1) amino acid selected from the following options: His Tyr
  MISC_FEATURE (131)..(131): Xaa at this position is a single (one, 1) amino acid selected from the following options: Gly Pro Ala Val Leu Ile Met Cys Phe Tyr Trp His Lys Arg Gln Asn Glu Asp Ser Thr
  MISC_FEATURE (132)..(132): Xaa at this position is a single (one, 1) amino acid selected from the following options: Gly Pro Ala Val Leu Ile Met Cys Phe Tyr Trp His Lys Arg Gln Asn Glu Asp Ser Thr
  MISC_FEATURE (133)..(133): Xaa at this position is a single (one, 1) amino acid selected from the following options: Glu Gln Lys Val
  MISC_FEATURE (134)..(134): Xaa at this position is a single (one, 1) amino acid selected from the following options: Glu Asp Asn Lys
  MISC_FEATURE (135)..(135): Xaa at this position is a single (one, 1) amino acid selected from the following options: Glu Val
  MISC_FEATURE (136)..(136): Xaa at this position is a single (one, 1) amino acid selected from the following options: Ile Val
  MISC_FEATURE (137)..(137): Xaa at this position is a single (one, 1) amino acid selected from the following options: Val Thr Ser Asp Asn Gly Ala Glu Gln Tyr Arg
  MISC_FEATURE (138)..(138): Xaa at this position is a single (one, 1) amino acid selected from the following options: Gly Pro Ala Val Leu Ile Met Cys Phe Tyr Trp His Lys Arg Gln Asn Glu Asp Ser Thr
  MISC_FEATURE (139)..(139): Xaa at this position is a single (one, 1) amino acid selected from the following options: Gly Pro Ala Val Leu Ile Met Cys Phe Tyr Trp His Lys Arg Gln Asn Glu Asp Ser Thr
  MISC_FEATURE (140)..(140): Xaa at this position is a single (one, 1) amino acid selected from the following options: Lys Ser Met Val His Ala Arg Gln Glu Ile Leu Val
  MISC_FEATURE (141)..(141): Xaa at this position is a single (one, 1) amino acid selected from the following options: Lys Glu Gln Arg Gly
  MISC_FEATURE (142)..(142): Xaa at this position is a single (one, 1) amino acid selected from the following options: Glu Ala Gln
HHHHHHDYKDDDDKXXXXRRRRRXXXXXXXXXXXXXXXXXXXXXXXXXXXXXXXXXXXXXXXXXXXXMAXXXXXXXXXXXXXXXXXXXXXXXXXXXXXXXXXXXXXXXXXXXXXXXXXXXXXXXXXXXXXXXXXXXXXXXXXI

SEQ ID NO: 153 - protein, 127 aa, Artificial Sequence
  Designed; as detailed elsewhere in present application
  MISC_FEATURE (15)..(15): Xaa at this position is a single (one, 1) amino acid (or lack thereof) selected from the following options: Ala Val Leu Ile Gly Pro or absent (no amino acid at this position and so this position is not present)
  MISC_FEATURE (15)..(67): If adjacent residues are both cysteine, optionally they can be connected by a disulfide, instead of a peptide, bond
  MISC_FEATURE (16)..(16): Xaa at this position is a single (one, 1) amino acid (or lack thereof) selected from the following options: Cys Gly Pro or absent (no amino acid at this position and so this position is not present)
  MISC_FEATURE (17)..(17): Xaa at this position is a single (one, 1) amino acid (or lack thereof) selected from the following options: Cys Gly Pro or absent (no amino acid at this position and so this position is not present)
  MISC_FEATURE (18)..(18): Xaa at this position is a single (one, 1) amino acid (or lack thereof) selected from the following options: Ala Val Leu Ile Gly Pro or absent (no amino acid at this position and so this position is not present)
  MISC_FEATURE (24)..(67): Xaa is a single (one, 1) amino acid (or lack thereof) INDEPENDENTLY selected for each of these positions from the following options: Arg Cys Gly Pro Ala Val Leu Ile or absent (no amino acid at this position and so this position is not present)
  MISC_FEATURE (70)..(70): Xaa at this position is a single (one, 1) amino acid selected from the following options: Val Gly Ala Thr
  MISC_FEATURE (71)..(71): Xaa at this position is a single (one, 1) amino acid selected from the following options: Thr Ser Pro
  MISC_FEATURE (72)..(72): Xaa at this position is a single (one, 1) amino acid selected from the following options: Glu Ala Val
  MISC_FEATURE (73)..(73): Xaa at this position is a single (one, 1) amino acid selected from the following options: Leu Thr Gln
  MISC_FEATURE (74)..(74): Xaa at this position is a single (one, 1) amino acid selected from the following options: Ala Val
  MISC_FEATURE (75)..(75): Xaa at this position is a single (one, 1) amino acid selected from the following options: Ala Val Leu Ile Thr
  MISC_FEATURE (76)..(76): Xaa at this position is a single (one, 1) amino acid selected from the following options: Trp Arg Gln
  MISC_FEATURE (77)..(77): Xaa at this position is a single (one, 1) amino acid selected from the following options: Thr Val Met Ala Ser Leu
  MISC_FEATURE (78)..(78): Xaa at this position is a single (one, 1) amino acid selected from the following options: Gln Trp Arg
  MISC_FEATURE (79)..(79): Xaa at this position is a single (one, 1) amino acid selected from the following options: Leu Phe Gln
  MISC_FEATURE (80)..(80): Xaa at this position is a single (one, 1) amino acid selected from the following options: Arg Gly Tyr Cys Ala
  MISC_FEATURE (81)..(81): Xaa at this position is a single (one, 1) amino acid selected from the following options: Val Ser Ala Thr Met Arg
  MISC_FEATURE (82)..(82): Xaa at this position is a single (one, 1) amino acid selected from the following options: Trp Leu
  MISC_FEATURE (83)..(83): Xaa at this position is a single (one, 1) amino acid selected from the following options: Gly Ser
  MISC_FEATURE (84)..(84): Xaa at this position is a single (one, 1) amino acid selected from the following options: Val Ala Met
  MISC_FEATURE (85)..(85): Xaa at this position is a single (one, 1) amino acid selected from the following options: Arg Trp Lys Leu
  MISC_FEATURE (86)..(86): Xaa at this position is a single (one, 1) amino acid selected from the following options: Thr Ala Val Ser
  MISC_FEATURE (87)..(87): Xaa at this position is a single (one, 1) amino acid selected from the following options: Met Leu Ile Arg Val Ala Thr
  MISC_FEATURE (88)..(88): Xaa at this position is a single (one, 1) amino acid selected from the following options: Gln Arg
  MISC_FEATURE (89)..(89): Xaa at this position is a single (one, 1) amino acid selected from the following options: Ala Thr Gly Ser
  MISC_FEATURE (90)..(90): Xaa at this position is a single (one, 1) amino acid selected from the following options: Leu Arg Gln Gly
  MISC_FEATURE (91)..(91): Xaa at this position is a single (one, 1) amino acid selected from the following options: Gly Ser
  MISC_FEATURE (92)..(92): Xaa at this position is a single (one, 1) amino acid selected from the following options: Phe Tyr
  MISC_FEATURE (93)..(93): Xaa at this position is a single (one, 1) amino acid selected from the following options: Ala Gly Gln Pro
  MISC_FEATURE (94)..(94): Xaa at this position is a single (one, 1) amino acid selected from the following options: Gly Pro Ala Val Leu Ile Met Cys Phe Tyr Trp His Lys Arg Gln Asn Glu Asp Ser Thr
  MISC_FEATURE (95)..(95): Xaa at this position is a single (one, 1) amino acid selected from the following options: Ile Val Leu Glu Phe
  MISC_FEATURE (96)..(96): Xaa at this position is a single (one, 1) amino acid selected from the following options: Trp Arg Lys Glu Thr Tyr
  MISC_FEATURE (97)..(97): Xaa at this position is a single (one, 1) amino acid selected from the following options: Asn Glu Asp Ala Lys Ser
  MISC_FEATURE (98)..(98): Xaa at this position is a single (one, 1) amino acid selected from the following options: Ala Arg Lys Cys
  MISC_FEATURE (99)..(99): Xaa at this position is a single (one, 1) amino acid selected from the following options: Gly Tyr Glu Pro
  MISC_FEATURE (100)..(100): Xaa at this position is a single (one, 1) amino acid selected from the following options: Val Gly Phe Lys Arg
  MISC_FEATURE (101)..(101): Xaa at this position is a single (one, 1) amino acid selected from the following options: Asp Ala Ser Arg Leu
  MISC_FEATURE (102)..(102): Xaa at this position is a single (one, 1) amino acid selected from the following options: Phe Leu Ile Glu Ser
  MISC_FEATURE (103)..(103): Xaa at this position is a single (one, 1) amino acid selected from the following options: Arg Gly Ala Ile Glu Ser Pro
  MISC_FEATURE (104)..(104): Xaa at this position is a single (one, 1) amino acid selected from the following options: Lys Arg Thr Glu Gln
  MISC_FEATURE (105)..(105): Xaa at this position is a single (one, 1) amino acid selected from the following options: Arg Lys Met
  MISC_FEATURE (106)..(106): Xaa at this position is a single (one, 1) amino acid selected from the following options: Gly Pro Ala Val Leu Ile Met Cys Phe Tyr Trp His Lys Arg Gln Asn Glu Asp Ser Thr
  MISC_FEATURE (107)..(107): Xaa at this position is a single (one, 1) amino acid selected from the following options: Gln Ala Lys Arg Pro Phe Val
  MISC_FEATURE (108)..(108): Xaa at this position is a single (one, 1) amino acid selected from the following options: Ala Ser Arg
  MISC_FEATURE (109)..(109): Xaa at this position is a single (one, 1) amino acid selected from the following options: Lys Glu Asp His Ala Ile
  MISC_FEATURE (110)..(110): Xaa at this position is a single (one, 1) amino acid selected from the following options: Gly Glu Pro Arg
  MISC_FEATURE (111)..(111): Xaa at this position is a single (one, 1) amino acid selected from the following options: Glu Asp Tyr Thr Gln
  MISC_FEATURE (112)..(112): Xaa at this position is a single (one, 1) amino acid selected from the following options: Arg Met Lys
  MISC_FEATURE (113)..(113): Xaa at this position is a single (one, 1) amino acid selected from the following options: Tyr Phe Glu
  MISC_FEATURE (114)..(114): Xaa at this position is a single (one, 1) amino acid selected from the following options: Leu Phe Pro Gln
  MISC_FEATURE (115)..(115): Xaa at this position is a single (one, 1) amino acid selected from the following options: Arg Leu Lys
  MISC_FEATURE (116)..(116): Xaa at this position is a single (one, 1) amino acid selected from the following options: Ala Lys Glu Thr Asp Gln Arg
  MISC_FEATURE (117)..(117): Xaa at this position is a single (one, 1) amino acid selected from the following options: Gln Arg Lys Ala Cys
  MISC_FEATURE (118)..(118): Xaa at this position is a single (one, 1) amino acid selected from the following options: Ser Thr Ala Asn Glu Leu
  MISC_FEATURE (119)..(119): Xaa at this position is a single (one, 1) amino acid selected from the following options: Arg Lys Gln His Ala
  MISC_FEATURE (120)..(120): Xaa at this position is a single (one, 1) amino acid selected from the following options: Glu Gln Lys
  MISC_FEATURE (121)..(121): Xaa at this position is a single (one, 1) amino acid selected from the following options: Gln Lys
  MISC_FEATURE (122)..(122): Xaa at this position is a single (one, 1) amino acid selected from the following options: Leu His Met Glu
  MISC_FEATURE (123)..(123): Xaa at this position is a single (one, 1) amino acid selected from the following options: Ala Leu Glu Thr Asp Ser
  MISC_FEATURE (124)..(124): Xaa at this position is a single (one, 1) amino acid selected from the following options: Ala Thr Arg Ile Ser Asn Val Met Asp
  MISC_FEATURE (125)..(125): Xaa at this position is a single (one, 1) amino acid selected from the following options: Leu Glu
  MISC_FEATURE (126)..(126): Xaa at this position is a single (one, 1) amino acid selected from the following options: Lys Arg Ile
  MISC_FEATURE (127)..(127): Xaa at this position is a single (one, 1) amino acid selected from the following options: Lys Asn Arg Thr Glu
HHHHHHDYKDDDDKXXXXRRRRRXXXXXXXXXXXXXXXXXXXXXXXXXXXXXXXXXXXXXXXXXXXXMAXXXXXXXXXXXXXXXXXXXXXXXXXXXXXXXXXXXXXXXXXXXXXXXXXXXXXXXXXX

SEQ ID NO: 154 - protein, 126 aa, Artificial Sequence
  Designed; as detailed elsewhere in present application
  MISC_FEATURE (15)..(15): Xaa at this position is a single (one, 1) amino acid (or lack thereof) selected from the following options: Ala Val Leu Ile Gly Pro or absent (no amino acid at this position and so this position is not present)
  MISC_FEATURE (15)..(67): If adjacent residues are both cysteine, optionally they can be connected by a disulfide, instead of a peptide, bond
  MISC_FEATURE (16)..(16): Xaa at this position is a single (one, 1) amino acid (or lack thereof) selected from the following options: Cys Gly Pro or absent (no amino acid at this position and so this position is not present)
  MISC_FEATURE (17)..(17): Xaa at this position is a single (one, 1) amino acid (or lack thereof) selected from the following options: Cys Gly Pro or absent (no amino acid at this position and so this position is not present)
  MISC_FEATURE (18)..(18): Xaa at this position is a single (one, 1) amino acid (or lack thereof) selected from the following options: Ala Val Leu Ile Gly Pro or absent (no amino acid at this position and so this position is not present)
  MISC_FEATURE (24)..(67): Xaa is a single (one, 1) amino acid (or lack thereof) INDEPENDENTLY selected for each of these positions from the following options: Arg Cys Gly Pro Ala Val Leu Ile or absent (no amino acid at this position and so this position is not present)
  MISC_FEATURE (70)..(70): Xaa at this position is a single (one, 1) amino acid selected from the following options: Val Gly Ala Thr
  MISC_FEATURE (71)..(71): Xaa at this position is a single (one, 1) amino acid selected from the following options: Thr Ser Pro
  MISC_FEATURE (72)..(72): Xaa at this position is a single (one, 1) amino acid selected from the following options: Glu Ala Val
  MISC_FEATURE (73)..(73): Xaa at this position is a single (one, 1) amino acid selected from the following options: Leu Thr Gln
  MISC_FEATURE (74)..(74): Xaa at this position is a single (one, 1) amino acid selected from the following options: Ala Val
  MISC_FEATURE (75)..(75): Xaa at this position is a single (one, 1) amino acid selected from the following options: Ala Val Leu Ile Thr
  MISC_FEATURE (76)..(76): Xaa at this position is a single (one, 1) amino acid selected from the following options: Trp Arg Gln
  MISC_FEATURE (77)..(77): Xaa at this position is a single (one, 1) amino acid selected from the following options: Thr Val Met Ala Ser Leu
  MISC_FEATURE (78)..(78): Xaa at this position is a single (one, 1) amino acid selected from the following options: Gln Trp Arg
  MISC_FEATURE (79)..(79): Xaa at this position is a single (one, 1) amino acid selected from the following options: Leu Phe Gln
  MISC_FEATURE (80)..(80): Xaa at this position is a single (one, 1) amino acid selected from the following options: Arg Gly Tyr Cys Ala
  MISC_FEATURE (81)..(81): Xaa at this position is a single (one, 1) amino acid selected from the following options: Val Ser Ala Thr Met Arg
  MISC_FEATURE (82)..(82): Xaa at this position is a single (one, 1) amino acid selected from the following options: Trp Leu
  MISC_FEATURE (83)..(83): Xaa at this position is a single (one, 1) amino acid selected from the following options: Gly Ser
  MISC_FEATURE (84)..(84): Xaa at this position is a single (one, 1) amino acid selected from the following options: Val Ala Met
  MISC_FEATURE (85)..(85): Xaa at this position is a single (one, 1) amino acid selected from the following options: Arg Trp Lys Leu
  MISC_FEATURE (86)..(86): Xaa at this position is a single (one, 1) amino acid selected from the following options: Thr Ala Val Ser
  MISC_FEATURE (87)..(87): Xaa at this position is a single (one, 1) amino acid selected from the following options: Met Leu Ile Arg Val Ala Thr
  MISC_FEATURE (88)..(88): Xaa at this position is a single (one, 1) amino acid selected from the following options: Gln Arg
  MISC_FEATURE (89)..(89): Xaa at this position is a single (one, 1) amino acid selected from the following options: Ala Thr Gly Ser
  MISC_FEATURE (90)..(90): Xaa at this position is a single (one, 1) amino acid selected from the following options: Leu Arg Gln Gly
  MISC_FEATURE (91)..(91): Xaa at this position is a single (one, 1) amino acid selected from the following options: Gly Ser
  MISC_FEATURE (92)..(92): Xaa at this position is a single (one, 1) amino acid selected from the following options: Phe Tyr
  MISC_FEATURE (93)..(93): Xaa at this position is a single (one, 1) amino acid selected from the following options: Gly Pro Ala Val Leu Ile Met Cys Phe Tyr Trp His Lys Arg Gln Asn Glu Asp Ser Thr
  MISC_FEATURE (94)..(94): Xaa at this position is a single (one, 1) amino acid selected from the following options: Ile Val Leu Glu Phe
  MISC_FEATURE (95)..(95): Xaa at this position is a single (one, 1) amino acid selected from the following options: Trp Arg Lys Glu Thr Tyr
  MISC_FEATURE (96)..(96): Xaa at this position is a single (one, 1) amino acid selected from the following options: Asn Glu Asp Ala Lys Ser
  MISC_FEATURE (97)..(97): Xaa at this position is a single (one, 1) amino acid selected from the following options: Ala Arg Lys Cys
  MISC_FEATURE (98)..(98): Xaa at this position is a single (one, 1) amino acid selected from the following options: Gly Tyr Glu Pro
  MISC_FEATURE (99)..(99): Xaa at this position is a single (one, 1) amino acid selected from the following options: Val Gly Phe Lys Arg
  MISC_FEATURE (100)..(100): Xaa at this position is a single (one, 1) amino acid selected from the following options: Asp Ala Ser Arg Leu
  MISC_FEATURE (101)..(101): Xaa at this position is a single (one, 1) amino acid selected from the following options: Phe Leu Ile Glu Ser
  MISC_FEATURE (102)..(102): Xaa at this position is a single (one, 1) amino acid selected from the following options: Arg Gly Ala Ile Glu Ser Pro
  MISC_FEATURE (103)..(103): Xaa at this position is a single (one, 1) amino acid selected from the following options: Lys Arg Thr Glu Gln
  MISC_FEATURE (104)..(104): Xaa at this position is a single (one, 1) amino acid selected from the following options: Arg Lys Met
  MISC_FEATURE (105)..(105): Xaa at this position is a single (one, 1) amino acid selected from the following options: Gly Pro Ala Val Leu Ile Met Cys Phe Tyr Trp His Lys Arg Gln Asn Glu Asp Ser Thr
  MISC_FEATURE (106)..(106): Xaa at this position is a single (one, 1) amino acid selected from the following options: Gln Ala Lys Arg Pro Phe Val
  MISC_FEATURE (107)..(107): Xaa at this position is a single (one, 1) amino acid selected from the following options: Ala Ser Arg
  MISC_FEATURE (108)..(108): Xaa at this position is a single (one, 1) amino acid selected from the following options: Lys Glu Asp His Ala Ile
  MISC_FEATURE (109)..(109): Xaa at this position is a single (one, 1) amino acid selected from the following options: Gly Glu Pro Arg
  MISC_FEATURE (110)..(110): Xaa at this position is a single (one, 1) amino acid selected from the following options: Glu Asp Tyr Thr Gln
  MISC_FEATURE (111)..(111): Xaa at this position is a single (one, 1) amino acid selected from the following options: Arg Met Lys
  MISC_FEATURE (112)..(112): Xaa at this position is a single (one, 1) amino acid selected from the following options: Tyr Phe Glu
  MISC_FEATURE (113)..(113): Xaa at this position is a single (one, 1) amino acid selected from the following options: Leu Phe Pro Gln
  MISC_FEATURE (114)..(114): Xaa at this position is a single (one, 1) amino acid selected from the following options: Arg Leu Lys
  MISC_FEATURE (115)..(115): Xaa at this position is a single (one, 1) amino acid selected from the following options: Ala Lys Glu Thr Asp Gln Arg
  MISC_FEATURE (116)..(116): Xaa at this position is a single (one, 1) amino acid selected from the following options: Gln Arg Lys Ala Cys
  MISC_FEATURE (117)..(117): Xaa at this position is a single (one, 1) amino acid selected from the following options: Ser Thr Ala Asn Glu Leu
  MISC_FEATURE (118)..(118): Xaa at this position is a single (one, 1) amino acid selected from the following options: Arg Lys Gln His Ala
  MISC_FEATURE (119)..(119): Xaa at this position is a single (one, 1) amino acid selected from the following options: Glu Gln Lys
  MISC_FEATURE (120)..(120): Xaa at this position is a single (one, 1) amino acid selected from the following options: Gln Lys
  MISC_FEATURE (121)..(121): Xaa at this position is a single (one, 1) amino acid selected from the following options: Leu His Met Glu
  MISC_FEATURE (122)..(122): Xaa at this position is a single (one, 1) amino acid selected from the following options: Ala Leu Glu Thr Asp Ser
  MISC_FEATURE (123)..(123): Xaa at this position is a single (one, 1) amino acid selected from the following options: Ala Thr Arg Ile Ser Asn Val Met Asp
  MISC_FEATURE (124)..(124): Xaa at this position is a single (one, 1) amino acid selected from the following options: Leu Glu
  MISC_FEATURE (125)..(125): Xaa at this position is a single (one, 1) amino acid selected from the following options: Lys Arg Ile
  MISC_FEATURE (126)..(126): Xaa at this position is a single (one, 1) amino acid selected from the following options: Lys Asn Arg Thr Glu
HHHHHHDYKDDDDKXXXXRRRRRXXXXXXXXXXXXXXXXXXXXXXXXXXXXXXXXXXXXXXXXXXXXMAXXXXXXXXXXXXXXXXXXXXXXXXXXXXXXXXXXXXXXXXXXXXXXXXXXXXXXXXX

SEQ ID NO: 155 - protein, 109 aa, Artificial Sequence
  Designed; as detailed elsewhere in present application
  MISC_FEATURE (15)..(15): Xaa at this position is a single (one, 1) amino acid (or lack thereof) selected from the following options: Ala Val Leu Ile Gly Pro or absent (no amino acid at this position and so this position is not present)
  MISC_FEATURE (15)..(67): If adjacent residues are both cysteine, optionally they can be connected by a disulfide, instead of a peptide, bond
  MISC_FEATURE (16)..(16): Xaa at this position is a single (one, 1) amino acid (or lack thereof) selected from the following options: Cys Gly Pro or absent (no amino acid at this position and so this position is not present)
  MISC_FEATURE (17)..(17): Xaa at this position is a single (one, 1) amino acid (or lack thereof) selected from the following options: Cys Gly Pro or absent (no amino acid at this position and so this position is not present)
  MISC_FEATURE (18)..(18): Xaa at this position is a single (one, 1) amino acid (or lack thereof) selected from the following options: Ala Val Leu Ile Gly Pro or absent (no amino acid at this position and so this position is not present)
  MISC_FEATURE (24)..(67): Xaa is a single (one, 1) amino acid (or lack thereof) INDEPENDENTLY selected for each of these positions from the following options: Arg Cys Gly Pro Ala Val Leu Ile or absent (no amino acid at this position and so this position is not present)
  MISC_FEATURE (70)..(70): Xaa at this position is a single (one, 1) amino acid selected from the following options: Val Gly Ala Thr
  MISC_FEATURE (71)..(71): Xaa at this position is a single (one, 1) amino acid selected from the following options: Thr Ser Pro
  MISC_FEATURE (72)..(72): Xaa at this position is a single (one, 1) amino acid selected from the following options: Glu Ala Val
  MISC_FEATURE (73)..(73): Xaa at this position is a single (one, 1) amino acid selected from the following options: Leu Thr Gln
  MISC_FEATURE (74)..(74): Xaa at this position is a single (one, 1) amino acid selected from the following options: Ala Val
  MISC_FEATURE (75)..(75): Xaa at this position is a single (one, 1) amino acid selected from the following options: Ala Val Leu Ile Thr
  MISC_FEATURE (76)..(76): Xaa at this position is a single (one, 1) amino acid selected from the following options: Trp Arg Gln
  MISC_FEATURE (77)..(77): Xaa at this position is a single (one, 1) amino acid selected from the following options: Thr Val Met Ala Ser Leu
  MISC_FEATURE (78)..(78): Xaa at this position is a single (one, 1) amino acid selected from the following options: Gln Trp Arg
  MISC_FEATURE (79)..(79): Xaa at this position is a single (one, 1) amino acid selected from the following options: Leu Phe Gln
  MISC_FEATURE (80)..(80): Xaa at this position is a single (one, 1) amino acid selected from the following options: Arg Gly Tyr Cys Ala
  MISC_FEATURE (81)..(81): Xaa at this position is a single (one, 1) amino acid selected from the following options: Val Ser Ala Thr Met Arg
  MISC_FEATURE (82)..(82): Xaa at this position is a single (one, 1) amino acid selected from the following options: Trp Leu
  MISC_FEATURE (83)..(83): Xaa at this position is a single (one, 1) amino acid selected from the following options: Gly Ser
  MISC_FEATURE (84)..(84): Xaa at this position is a single (one, 1) amino acid selected from the following options: Val Ala Met
  MISC_FEATURE (85)..(85): Xaa at this position is a single (one, 1) amino acid selected from the following options: Arg Trp Lys Leu
  MISC_FEATURE (86)..(86): Xaa at this position is a single (one, 1) amino acid selected from the following options: Thr Ala Val Ser
  MISC_FEATURE (87)..(87): Xaa at this position is a single (one, 1) amino acid selected from the following options: Met Leu Ile Arg Val Ala Thr
  MISC_FEATURE (88)..(88): Xaa at this position is a single (one, 1) amino acid selected from the following options: Gln Arg
  MISC_FEATURE (89)..(89): Xaa at this position is a single (one, 1) amino acid selected from the following options: Ala Thr Gly Ser
  MISC_FEATURE (90)..(90): Xaa at this position is a single (one, 1) amino acid selected from the following options: Leu Arg Gln Gly
  MISC_FEATURE (91)..(91): Xaa at this position is a single (one, 1) amino acid selected from the following options: Gly Ser
  MISC_FEATURE (92)..(92): Xaa at this position is a single (one, 1) amino acid selected from the following options: Phe Tyr
  MISC_FEATURE (93)..(93): Xaa at this position is a single (one, 1) amino acid selected from the following options: Leu His Met Glu
  MISC_FEATURE (94)..(94): Xaa at this position is a single (one, 1) amino acid selected from the following options: Ala Leu Glu Thr Asp Ser
  MISC_FEATURE (95)..(95): Xaa at this position is a single (one, 1) amino acid selected from the following options: Ala Thr Arg Ile Ser Asn Val Met Asp
  MISC_FEATURE (96)..(96): Xaa at this position is a single (one, 1) amino acid selected from the following options: Leu Glu
  MISC_FEATURE (97)..(97): Xaa at this position is a single (one, 1) amino acid selected from the following options: Lys Arg Ile
  MISC_FEATURE (98)..(98): Xaa at this position is a single (one, 1) amino acid selected from the following options: Lys Asn Arg Thr Glu
  MISC_FEATURE (99)..(99): Xaa at this position is a single (one, 1) amino acid selected from the following options: Gly Pro Ala Val Leu Ile Met Cys Phe Tyr Trp His Lys Arg Gln Asn Glu Asp Ser Thr
  MISC_FEATURE (100)..(100): Xaa at this position is a single (one, 1) amino acid selected from the following options: Gly Pro Ala Val Leu Ile Met Cys Phe Tyr Trp His Lys Arg Gln Asn Glu Asp Ser Thr
  MISC_FEATURE (101)..(101): Xaa at this position is a single (one, 1) amino acid selected from the following options: Glu Gln Lys Val
  MISC_FEATURE (102)..(102): Xaa at this position is a single (one, 1) amino acid selected from the following options: Glu Asp Asn Lys
  MISC_FEATURE (103)..(103): Xaa at this position is a single (one, 1) amino acid selected from the following options: Glu Val
  MISC_FEATURE (104)..(104): Xaa at this position is a single (one, 1) amino acid selected from the following options: Ile Val
  MISC_FEATURE (105)..(105): Xaa at this position is a single (one, 1) amino acid selected from the following options: Val Thr Ser Asp Asn Gly Ala Glu Gln Tyr Arg
  MISC_FEATURE (106)..(106): Xaa at this position is a single (one, 1) amino acid selected from the following options: Gly Pro Ala Val Leu Ile Met Cys Phe Tyr Trp His Lys Arg Gln Asn Glu Asp Ser Thr
  MISC_FEATURE (107)..(107): Xaa at this position is a single (one, 1) amino acid selected from the following options: Gly Pro Ala Val Leu Ile Met Cys Phe Tyr Trp His Lys Arg Gln Asn Glu Asp Ser Thr
  MISC_FEATURE (108)..(108): Xaa at this position is a single (one, 1) amino acid selected from the following options: Lys Ser Met Val His Ala Arg Gln Glu Ile Leu Val
  MISC_FEATURE (109)..(109): Xaa at this position is a single (one, 1) amino acid selected from the following options: Lys Glu Gln Arg Gly
HHHHHHDYKDDDDKXXXXRRRRRXXXXXXXXXXXXXXXXXXXXXXXXXXXXXXXXXXXXXXXXXXXXMAXXXXXXXXXXXXXXXXXXXXXXXXXXXXXXXXXXXXXXXX

SEQ ID NO: 156 - protein, 25 aa, Artificial Sequence
  Designed; as detailed elsewhere in present application
  MISC_FEATURE (3)..(3): Xaa at this position is a single (one, 1) amino acid selected from the following options: Val Gly
  MISC_FEATURE (4)..(4): Xaa at this position is a single (one, 1) amino acid selected from the following options: Thr Ser
  MISC_FEATURE (8)..(8): Xaa at this position is a single (one, 1) amino acid selected from the following options: Ala Val
  MISC_FEATURE (10)..(10): Xaa at this position is a single (one, 1) amino acid selected from the following options: Thr Ala
  MISC_FEATURE (11)..(11): Xaa at this position is a single (one, 1) amino acid selected from the following options: Trp Arg
  MISC_FEATURE (12)..(12): Xaa at this position is a single (one, 1) amino acid selected from the following options: Leu Phe
  MISC_FEATURE (17)..(17): Xaa at this position is a single (one, 1) amino acid selected from the following options: Val Met
  MISC_FEATURE (18)..(18): Xaa at this position is a single (one, 1) amino acid selected from the following options: Arg Lys
  MISC_FEATURE (19)..(19): Xaa at this position is a single (one, 1) amino acid selected from the following options: Thr Val
  MISC_FEATURE (20)..(20): Xaa at this position is a single (one, 1) amino acid selected from the following options: Met Leu
MAXXALAXRXXXGVWGXXXXQARGF

SEQ ID NO: 157 - protein, 152 aa, Artificial Sequence
  Designed; as detailed elsewhere in present application
  MISC_FEATURE (15)..(15): Xaa at this position is a single (one, 1) amino acid (or lack thereof) selected from the following options: Ala Val Leu Ile Gly Pro or absent (no amino acid at this position and so this position is not present)
  MISC_FEATURE (15)..(67): If adjacent residues are both cysteine, optionally they can be connected by a disulfide, instead of a peptide, bond
  MISC_FEATURE (16)..(16): Xaa at this position is a single (one, 1) amino acid (or lack thereof) selected from the following options: Cys Gly Pro or absent (no amino acid at this position and so this position is not present)
  MISC_FEATURE (17)..(17): Xaa at this position is a single (one, 1) amino acid (or lack thereof) selected from the following options: Cys Gly Pro or absent (no amino acid at this position and so this position is not present)
  MISC_FEATURE (18)..(18): Xaa at this position is a single (one, 1) amino acid (or lack thereof) selected from the following options: Ala Val Leu Ile Gly Pro or absent (no amino acid at this position and so this position is not present)
  MISC_FEATURE (24)..(67): Xaa is a single (one, 1) amino acid (or lack thereof) INDEPENDENTLY selected for each of these positions from the following options: Arg Cys Gly Pro Ala Val Leu Ile or absent (no amino acid at this position and so this position is not present)
  MISC_FEATURE (70)..(70): Xaa at this position is a single (one, 1) amino acid selected from the following options: Val Gly
  MISC_FEATURE (71)..(71): Xaa at this position is a single (one, 1) amino acid selected from the following options: Thr Ser
  MISC_FEATURE (75)..(75): Xaa at this position is a single (one, 1) amino acid selected from the following options: Ala Val
  MISC_FEATURE (77)..(77): Xaa at this position is a single (one, 1) amino acid selected from the following options: Thr Ala
  MISC_FEATURE (78)..(78): Xaa at this position is a single (one, 1) amino acid selected from the following options: Trp Arg
  MISC_FEATURE (79)..(79): Xaa at this position is a single (one, 1) amino acid selected from the following options: Leu Phe
  MISC_FEATURE (84)..(84): Xaa at this position is a single (one, 1) amino acid selected from the following options: Val Met
  MISC_FEATURE (85)..(85): Xaa at this position is a single (one, 1) amino acid selected from the following options: Arg Lys
  MISC_FEATURE (86)..(86): Xaa at this position is a single (one, 1) amino acid selected from the following options: Thr Val
  MISC_FEATURE (87)..(87): Xaa at this position is a single (one, 1) amino acid selected from the following options: Met Leu
  MISC_FEATURE (93)..(93): Xaa at this position is a single (one, 1) amino acid selected from the following options: Gly Ser
  MISC_FEATURE (95)..(95): Xaa at this position is a single (one, 1) amino acid selected from the following options: Glu Asp
  MISC_FEATURE (96)..(96): Xaa at this position is a single (one, 1) amino acid selected from the following options: Ser Pro Gln
  MISC_FEATURE (97)..(97): Xaa at this position is a single (one, 1) amino acid selected from the following options: Ala Ser Pro
  MISC_FEATURE (98)..(98): Xaa at this position is a single (one, 1) amino acid selected from the following options: Asp Glu His
  MISC_FEATURE (99)..(99): Xaa at this position is a single (one, 1) amino acid selected from the following options: Asn Asp
  MISC_FEATURE (100)..(100): Xaa at this position is a single (one, 1) amino acid selected from the following options: Leu Val
  MISC_FEATURE (101)..(101): Xaa at this position is a single (one, 1) amino acid selected from the following options: Gly Asp Arg
  MISC_FEATURE (102)..(102): Xaa at this position is a single (one, 1) amino acid selected from the following options: Ser Arg
  MISC_FEATURE (103)..(103): Xaa at this position is a single (one, 1) amino acid selected from the following options: Ser Gly Arg Thr
  MISC_FEATURE (104)..(104): Xaa at this position is a single (one, 1) amino acid selected from the following options: Ala Glu
  MISC_FEATURE (105)..(105): Xaa at this position is a single (one, 1) amino acid selected from the following options: Gly Ala
  MISC_FEATURE (106)..(106): Xaa at this position is a single (one, 1) amino acid selected from the following options: Ser Thr Ala
  MISC_FEATURE (107)..(107): Xaa at this position is a single (one, 1) amino acid selected from the following options: Val Ile
  MISC_FEATURE (108)..(108): Xaa at this position is a single (one, 1) amino acid selected from the following options: Arg Trp
  MISC_FEATURE (109)..(109): Xaa at this position is a single (one, 1) amino acid selected from the following options: Asp Glu Asn
  MISC_FEATURE (112)..(112): Xaa at this position is a single (one, 1) amino acid selected from the following options: Gly Val
  MISC_FEATURE (113)..(113): Xaa at this position is a single (one, 1) amino acid selected from the following options: Ala Asp
  MISC_FEATURE (115)..(115): Xaa at this position is a single (one, 1) amino acid selected from the following options: Gly Arg Ala
  MISC_FEATURE (117)..(117): Xaa at this position is a single (one, 1) amino acid selected from the following options: Arg Lys
  MISC_FEATURE (118)..(118): Xaa at this position is a single (one, 1) amino acid selected from the following options: Glu Gln Ala
  MISC_FEATURE (119)..(119): Xaa at this position is a single (one, 1) amino acid selected from the following options: Gln Ala
  MISC_FEATURE (121)..(121): Xaa at this position is a single (one, 1) amino acid selected from the following options: Glu Lys
  MISC_FEATURE (122)..(122): Xaa at this position is a single (one, 1) amino acid selected from the following options: Glu Gly
  MISC_FEATURE (123)..(123): Xaa at this position is a single (one, 1) amino acid selected from the following options: Glu Gln
  MISC_FEATURE (126)..(126): Xaa at this position is a single (one, 1) amino acid selected from the following options: Phe Leu
  MISC_FEATURE (129)..(129): Xaa at this position is a single (one, 1) amino acid selected from the following options: Arg Gln Cys
  MISC_FEATURE (130)..(130): Xaa at this position is a single (one, 1) amino acid selected from the following options: Ala Ser
  MISC_FEATURE (131)..(131): Xaa at this position is a single (one, 1) amino acid selected from the following options: Lys Arg
  MISC_FEATURE (136)..(136): Xaa at this position is a single (one, 1) amino acid selected from the following options: Ala Thr
  MISC_FEATURE (140)..(140): Xaa at this position is a single (one, 1) amino acid selected from the following options: His Tyr Ala
  MISC_FEATURE (141)..(141): Xaa at this position is a single (one, 1) amino acid selected from the following options: His Lys Ala
  MISC_FEATURE (143)..(143): Xaa at this position is a single (one, 1) amino acid selected from the following options: Asn Glu
  MISC_FEATURE (146)..(146): Xaa at this position is a single (one, 1) amino acid selected from the following options: Ser Val Thr
  MISC_FEATURE (147)..(147): Xaa at this position is a single (one, 1) amino acid selected from the following options: His Ala
  MISC_FEATURE (148)..(148): Xaa at this position is a single (one, 1) amino acid selected from the following options: His Ser Thr Ala
  MISC_FEATURE (149)..(149): Xaa at this position is a single (one, 1) amino acid selected from the following options: Val Lys Met Glu
HHHHHHDYKDDDDKXXXXRRRRRXXXXXXXXXXXXXXXXXXXXXXXXXXXXXXXXXXXXXXXXXXXXMAXXALAXRXXXGVWGXXXXQARGFXSXXXXXXXXXXXXXXXAGXXFXKXXXAXXXRYXRAXXXEQLAXLKKXXEXEIXXXXKEI

SEQ ID NO: 158 - protein, 143 aa, Artificial Sequence
  Designed; as detailed elsewhere in present application
  MISC_FEATURE (15)..(15): Xaa at this position is a single (one, 1) amino acid (or lack thereof) selected from the following options: Ala Val Leu Ile Gly Pro or absent (no amino acid at this position and so this position is not present)
  MISC_FEATURE (15)..(67): If adjacent residues are both cysteine, optionally they can be connected by a disulfide, instead of a peptide, bond
  MISC_FEATURE (16)..(16): Xaa at this position is a single (one, 1) amino acid (or lack thereof) selected from the following options: Cys Gly Pro or absent (no amino acid at this position and so this position is not present)
  MISC_FEATURE (17)..(17): Xaa at this position is a single (one, 1) amino acid (or lack thereof) selected from the following options: Cys Gly Pro or absent (no amino acid at this position and so this position is not present)
  MISC_FEATURE (18)..(18): Xaa at this position is a single (one, 1) amino acid (or lack thereof) selected from the following options: Ala Val Leu Ile Gly Pro or absent (no amino acid at this position and so this position is not present)
  MISC_FEATURE (24)..(67): Xaa is a single (one, 1) amino acid (or lack thereof) INDEPENDENTLY selected for each of these positions from the following options: Arg Cys Gly Pro Ala Val Leu Ile or absent (no amino acid at this position and so this position is not present)
  MISC_FEATURE (70)..(70): Xaa at this position is a single (one, 1) amino acid selected from the following options: Val Gly
  MISC_FEATURE (71)..(71): Xaa at this position is a single (one, 1) amino acid selected from the following options: Thr Ser
  MISC_FEATURE (75)..(75): Xaa at this position is a single (one, 1) amino acid selected from the following options: Ala Val
  MISC_FEATURE (77)..(77): Xaa at this position is a single (one, 1) amino acid selected from the following options: Thr Ala
  MISC_FEATURE (78)..(78): Xaa at this position is a single (one, 1) amino acid selected from the following options: Trp Arg
  MISC_FEATURE (79)..(79): Xaa at this position is a single (one, 1) amino acid selected from the following options: Leu Phe
  MISC_FEATURE (84)..(84): Xaa at this position is a single (one, 1) amino acid selected from the following options: Val Met
  MISC_FEATURE (85)..(85): Xaa at this position is a single (one, 1) amino acid selected from the following options: Arg Lys
  MISC_FEATURE (86)..(86): Xaa at this position is a single (one, 1) amino acid selected from the following options: Thr Val
  MISC_FEATURE (87)..(87): Xaa at this position is a single (one, 1) amino acid selected from the following options: Met Leu
  MISC_FEATURE (93)..(93): Xaa at this position is a single (one, 1) amino acid selected from the following options: Ser Arg
  MISC_FEATURE (94)..(94): Xaa at this position is a single (one, 1) amino acid selected from the following options: Ser Gly Arg Thr
  MISC_FEATURE (95)..(95): Xaa at this position is a single (one, 1) amino acid selected from the following options: Ala Glu
  MISC_FEATURE (96)..(96): Xaa at this position is a single (one, 1) amino acid selected from the following options: Gly Ala
  MISC_FEATURE (97)..(97): Xaa at this position is a single (one, 1) amino acid selected from the following options: Ser Thr Ala
  MISC_FEATURE (98)..(98): Xaa at this position is a single (one, 1) amino acid selected from the following options: Val Ile
  MISC_FEATURE (99)..(99): Xaa at this position is a single (one, 1) amino acid selected from the following options: Arg Trp
  MISC_FEATURE (100)..(100): Xaa at this position is a single (one, 1) amino acid selected from the following options: Asp Glu Asn
  MISC_FEATURE (103)..(103): Xaa at this position is a single (one, 1) amino acid selected from the following options: Gly Val
  MISC_FEATURE (104)..(104): Xaa at this position is a single (one, 1) amino acid selected from the following options: Ala Asp
  MISC_FEATURE (106)..(106): Xaa at this position is a single (one, 1) amino acid selected from the following options: Gly Arg Ala
  MISC_FEATURE (108)..(108): Xaa at this position is a single (one, 1) amino acid selected from the following options: Arg Lys
  MISC_FEATURE (109)..(109): Xaa at this position is a single (one, 1) amino acid selected from the following options: Glu Gln Ala
  MISC_FEATURE (110)..(110): Xaa at this position is a single (one, 1) amino acid selected from the following options: Gln Ala
  MISC_FEATURE (112)..(112): Xaa at this position is a single (one, 1) amino acid selected from the following options: Glu Lys
  MISC_FEATURE (113)..(113): Xaa at this position is a single (one, 1) amino acid selected from the following options: Glu Gly
  MISC_FEATURE (114)..(114): Xaa at this position is a single (one, 1) amino acid selected from the following options: Glu Gln
  MISC_FEATURE (117)..(117): Xaa at this position is a single (one, 1) amino acid selected from the following options: Phe Leu
  MISC_FEATURE (120)..(120): Xaa at this position is a single (one, 1) amino acid selected from the following options: Arg Gln Cys
  MISC_FEATURE (121)..(121): Xaa at this position is a single (one, 1) amino acid selected from the following options: Ala Ser
  MISC_FEATURE (122)..(122): Xaa at this position is a single (one, 1) amino acid selected from the following options: Lys Arg
  MISC_FEATURE (127)..(127): Xaa at this position is a single (one, 1) amino acid selected from the following options: Ala Thr
  MISC_FEATURE (131)..(131): Xaa at this position is a single (one, 1) amino acid selected from the following options: His Tyr Ala
  MISC_FEATURE (132)..(132): Xaa at this position is a single (one, 1) amino acid selected from the following options: His Lys Ala
  MISC_FEATURE (134)..(134): Xaa at this position is a single (one, 1) amino acid selected from the following options: Asn Glu
  MISC_FEATURE (137)..(137): Xaa at this position is a single (one, 1) amino acid selected from the following options: Ser Val Thr
  MISC_FEATURE (138)..(138): Xaa at this position is a single (one, 1) amino acid selected from the following options: His Ala
  MISC_FEATURE (139)..(139): Xaa at this position is a single (one, 1) amino acid selected from the following options: His Ser Thr Ala
  MISC_FEATURE (140)..(140): Xaa at this position is a single (one, 1) amino acid selected from the following options: Val Lys Met Glu
HHHHHHDYKDDDDKXXXXRRRRRXXXXXXXXXXXXXXXXXXXXXXXXXXXXXXXXXXXXXXXXXXXXMAXXALAXRXXXGVWGXXXXQARGFXXXXXXXXAGXXFXKXXXAXXXRYXRAXXXEQLAXLKKXXEXEIXXXXKEI

SEQ ID NO: 159 - protein, 139 aa, Artificial Sequence
  Designed; as detailed elsewhere in present application
  MISC_FEATURE (15)..(15): Xaa at this position is a single (one, 1) amino acid (or lack thereof) selected from the following options: Ala Val Leu Ile Gly Pro or absent (no amino acid at this position and so this position is not present)
  MISC_FEATURE (15)..(67): If adjacent residues are both cysteine, optionally they can be connected by a disulfide, instead of a peptide, bond
  MISC_FEATURE (16)..(16): Xaa at this position is a single (one, 1) amino acid (or lack thereof) selected from the following options: Cys Gly Pro or absent (no amino acid at this position and so this position is not present)
  MISC_FEATURE (17)..(17): Xaa at this position is a single (one, 1) amino acid (or lack thereof) selected from the following options: Cys Gly Pro or absent (no amino acid at this position and so this position is not present)
  MISC_FEATURE (18)..(18): Xaa at this position is a single (one, 1) amino acid (or lack thereof) selected from the following options: Ala Val Leu Ile Gly Pro or absent (no amino acid at this position and so this position is not present)
  MISC_FEATURE (24)..(67): Xaa is a single (one, 1) amino acid (or lack thereof) INDEPENDENTLY selected for each of these positions from the following options: Arg Cys Gly Pro Ala Val Leu Ile or absent (no amino acid at this position and so this position is not present)
  MISC_FEATURE (70)..(70): Xaa at this position is a single (one, 1) amino acid selected from the following options: Val Gly
  MISC_FEATURE (71)..(71): Xaa at this position is a single (one, 1) amino acid selected from the following options: Thr Ser
  MISC_FEATURE (75)..(75): Xaa at this position is a single (one, 1) amino acid selected from the following options: Ala Val
  MISC_FEATURE (77)..(77): Xaa at this position is a single (one, 1) amino acid selected from the following options: Thr Ala
  MISC_FEATURE (78)..(78): Xaa at this position is a single (one, 1) amino acid selected from the following options: Trp Arg
  MISC_FEATURE (79)..(79): Xaa at this position is a single (one, 1) amino acid selected from the following options: Leu Phe
  MISC_FEATURE (84)..(84): Xaa at this position is a single (one, 1) amino acid selected from the following options: Val Met
  MISC_FEATURE (85)..(85): Xaa at this position is a single (one, 1) amino acid selected from the following options: Arg Lys
  MISC_FEATURE (86)..(86): Xaa at this position is a single (one, 1) amino acid selected from the following options: Thr Val
  MISC_FEATURE (87)..(87): Xaa at this position is a single (one, 1) amino acid selected from the following options: Met Leu
  MISC_FEATURE (93)..(93): Xaa at this position is a single (one, 1) amino acid selected from the following options: Ser Thr Ala
  MISC_FEATURE (94)..(94): Xaa at this position is a single (one, 1) amino acid selected from the following options: Val Ile
  MISC_FEATURE (95)..(95): Xaa at this position is a single (one, 1) amino acid selected from the following options: Arg Trp
  MISC_FEATURE (96)..(96): Xaa at this position is a single (one, 1) amino acid selected from the following options: Asp Glu Asn
  MISC_FEATURE (99)..(99): Xaa at this position is a single (one, 1) amino acid selected from the following options: Gly Val
  MISC_FEATURE (100)..(100): Xaa at this position is a single (one, 1) amino acid selected from the following options: Ala Asp
  MISC_FEATURE (102)..(102): Xaa at this position is a single (one, 1) amino acid selected from the following options: Gly Arg Ala
  MISC_FEATURE (104)..(104): Xaa at this position is a single (one, 1) amino acid selected from the following options: Arg Lys
  MISC_FEATURE (105)..(105): Xaa at this position is a single (one, 1) amino acid selected from the following options: Glu Gln Ala
  MISC_FEATURE (106)..(106): Xaa at this position is a single (one, 1) amino acid selected from the following options: Gln Ala
  MISC_FEATURE (108)..(108): Xaa at this position is a single (one, 1) amino acid selected from the following options: Glu Lys
  MISC_FEATURE (109)..(109): Xaa at this position is a single (one, 1) amino acid selected from the following options: Glu Gly
  MISC_FEATURE (110)..(110): Xaa at this position is a single (one, 1) amino acid selected from the following options: Glu Gln
  MISC_FEATURE (113)..(113): Xaa at this position is a single (one, 1) amino acid selected from the following options: Phe Leu
  MISC_FEATURE (116)..(116): Xaa at this position is a single (one, 1) amino acid selected from the following options: Arg Gln Cys
  MISC_FEATURE (117)..(117): Xaa at this position is a single (one, 1) amino acid selected from the following options: Ala Ser
  MISC_FEATURE (118)..(118): Xaa at this position is a single (one, 1) amino acid selected from the following options: Lys Arg
  MISC_FEATURE (123)..(123): Xaa at this position is a single (one, 1) amino acid selected from the following options: Ala Thr
  MISC_FEATURE (127)..(127): Xaa at this position is a single (one, 1) amino acid selected from the following options: His Tyr Ala
  MISC_FEATURE (128)..(128): Xaa at this position is a single (one, 1) amino acid selected from the following options: His Lys Ala
  MISC_FEATURE (130)..(130): Xaa at this position is a single (one, 1) amino acid selected from the following options: Asn Glu
  MISC_FEATURE (133)..(133): Xaa at this position is a single (one, 1) amino acid selected from the following options: Ser Val Thr
  MISC_FEATURE (134)..(134): Xaa at this position is a single (one, 1) amino acid selected from the following options: His Ala
  MISC_FEATURE (135)..(135): Xaa at this position is a single (one, 1) amino acid selected from the following options: His Ser Thr Ala
  MISC_FEATURE (136)..(136): Xaa at this position is a single (one, 1) amino acid selected from the following options: Val Lys Met Glu
HHHHHHDYKDDDDKXXXXRRRRRXXXXXXXXXXXXXXXXXXXXXXXXXXXXXXXXXXXXXXXXXXXXMAXXALAXRXXXGVWGXXXXQARGFXXXXAGXXFXKXXXAXXXRYXRAXXXEQLAXLKKXXEXEIXHXXKEI

SEQ ID NO: 160 - protein, 126 aa, Artificial Sequence
  Designed; as detailed elsewhere in present application
  MISC_FEATURE (15)..(15): Xaa at this position is a single (one, 1) amino acid (or lack thereof) selected from the following options: Ala Val Leu Ile Gly Pro or absent (no amino acid at this position and so this position is not present)
  MISC_FEATURE (15)..(67): If adjacent residues are both cysteine, optionally they can be connected by a disulfide, instead of a peptide, bond
  MISC_FEATURE (16)..(16): Xaa at this position is a single (one, 1) amino acid (or lack thereof) selected from the following options: Cys Gly Pro or absent (no amino acid at this position and so this position is not present)
  MISC_FEATURE (17)..(17): Xaa at this position is a single (one, 1) amino acid (or lack thereof) selected from the following options: Cys Gly Pro or absent (no amino acid at this position and so this position is not present)
  MISC_FEATURE (18)..(18): Xaa at this position is a single (one, 1) amino acid (or lack thereof) selected from the following options: Ala Val Leu Ile Gly Pro or absent (no amino acid at this position and so this position is not present)
  MISC_FEATURE (24)..(67): Xaa is a single (one, 1) amino acid (or lack thereof) INDEPENDENTLY selected for each of these positions from the following options: Arg Cys Gly Pro Ala Val Leu Ile or absent (no amino acid at this position and so this position is not present)
  MISC_FEATURE (70)..(70): Xaa at this position is a single (one, 1) amino acid selected from the following options: Val Gly
  MISC_FEATURE (71)..(71): Xaa at this position is a single (one, 1) amino acid selected from the following options: Thr Ser
  MISC_FEATURE (75)..(75): Xaa at this position is a single (one, 1) amino acid selected from the following options: Ala Val
  MISC_FEATURE (77)..(77): Xaa at this position is a single (one, 1) amino acid selected from the following options: Thr Ala
  MISC_FEATURE (78)..(78): Xaa at this position is a single (one, 1) amino acid selected from the following options: Trp Arg
  MISC_FEATURE (79)..(79): Xaa at this position is a single (one, 1) amino acid selected from the following options: Leu Phe
  MISC_FEATURE (84)..(84): Xaa at this position is a single (one, 1) amino acid selected from the following options: Val Met
  MISC_FEATURE (85)..(85): Xaa at this position is a single (one, 1) amino acid selected from the following options: Arg Lys
  MISC_FEATURE (86)..(86): Xaa at this position is a single (one, 1) amino acid selected from the following options: Thr Val
  MISC_FEATURE (87)..(87): Xaa at this position is a single (one, 1) amino acid selected from the following options: Met Leu
  MISC_FEATURE (93)..(93): Xaa at this position is a single (one, 1) amino acid selected from the following options: Ser Thr Ala
  MISC_FEATURE (94)..(94): Xaa at this position is a single (one, 1) amino acid selected from the following options: Trp Val Ile
  MISC_FEATURE (95)..(95): Xaa at this position is a single (one, 1) amino acid selected from the following options: Arg Trp
  MISC_FEATURE (96)..(96): Xaa at this position is a single (one, 1) amino acid selected from the following options: Asn Glu Asp
  MISC_FEATURE (99)..(99): Xaa at this position is a single (one, 1) amino acid selected from the following options: Gly Val
  MISC_FEATURE (100)..(100): Xaa at this position is a single (one, 1) amino acid selected from the following options: Ala Asp
  MISC_FEATURE (102)..(102): Xaa at this position is a single (one, 1) amino acid selected from the following options: Gly Arg
  MISC_FEATURE (104)..(104): Xaa at this position is a single (one, 1) amino acid selected from the following options: Lys Arg
  MISC_FEATURE (105)..(105): Xaa at this position is a single (one, 1) amino acid selected from the following options: Glu Gln Ala
  MISC_FEATURE (108)..(108): Xaa at this position is a single (one, 1) amino acid selected from the following options: Glu Lys
  MISC_FEATURE (109)..(109): Xaa at this position is a single (one, 1) amino acid selected from the following options: Glu Gly
  MISC_FEATURE (113)..(113): Xaa at this position is a single (one, 1) amino acid selected from the following options: Phe Leu
  MISC_FEATURE (116)..(116): Xaa at this position is a single (one, 1) amino acid selected from the following options: Arg Gln
  MISC_FEATURE (117)..(117): Xaa at this position is a single (one, 1) amino acid selected from the following options: Ala Ser
  MISC_FEATURE (118)..(118): Xaa at this position is a single (one, 1) amino acid selected from the following options: Lys Arg
HHHHHHDYKDDDDKXXXXRRRRRXXXXXXXXXXXXXXXXXXXXXXXXXXXXXXXXXXXXXXXXXXXXMAXXALAXRXXXGVWGXXXXQARGFXXXXAGXXFXKXXQAXXERYXRAXXXEQLAALKK

SEQ ID NO: 161 - protein, 109 aa, Artificial Sequence
  Designed; as detailed elsewhere in present application
  MISC_FEATURE (15)..(15): Xaa at this position is a single (one, 1) amino acid (or lack thereof) selected from the following options: Ala Val Leu Ile Gly Pro or absent (no amino acid at this position and so this position is not present)
  MISC_FEATURE (15)..(67): If adjacent residues are both cysteine, optionally they can be connected by a disulfide, instead of a peptide, bond
  MISC_FEATURE (16)..(16): Xaa at this position is a single (one, 1) amino acid (or lack thereof) selected from the following options: Cys Gly Pro or absent (no amino acid at this position and so this position is not present)
  MISC_FEATURE (17)..(17): Xaa at this position is a single (one, 1) amino acid (or lack thereof) selected from the following options: Cys Gly Pro or absent (no amino acid at this position and so this position is not present)
  MISC_FEATURE (18)..(18): Xaa at this position is a single (one, 1) amino acid (or lack thereof) selected from the following options: Ala Val Leu Ile Gly Pro or absent (no amino acid at this position and so this position is not present)
  MISC_FEATURE (24)..(67): Xaa is a single (one, 1) amino acid (or lack thereof) INDEPENDENTLY selected for each of these positions from the following options: Arg Cys Gly Pro Ala Val Leu Ile or absent (no amino acid at this position and so this position is not present)
  MISC_FEATURE (70)..(70): Xaa at this position is a single (one, 1) amino acid selected from the following options: Val Gly
  MISC_FEATURE (71)..(71): Xaa at this position is a single (one, 1) amino acid selected from the following options: Thr Ser
  MISC_FEATURE (75)..(75): Xaa at this position is a single (one, 1) amino acid selected from the following options: Ala Val
  MISC_FEATURE (77)..(77): Xaa at this position is a single (one, 1) amino acid selected from the following options: Thr Ala
  MISC_FEATURE (78)..(78): Xaa at this position is a single (one, 1) amino acid selected from the following options: Trp Arg
  MISC_FEATURE (79)..(79): Xaa at this position is a single (one, 1) amino acid selected from the following options: Leu Phe
  MISC_FEATURE (84)..(84): Xaa at this position is a single (one, 1) amino acid selected from the following options: Val Met
  MISC_FEATURE (85)..(85): Xaa at this position is a single (one, 1) amino acid selected from the following options: Arg Lys
  MISC_FEATURE (86)..(86): Xaa at this position is a single (one, 1) amino acid selected from the following options: Thr Val
  MISC_FEATURE (87)..(87): Xaa at this position is a single (one, 1) amino acid selected from the following options: Met Leu
  MISC_FEATURE (99)..(99): Xaa at this position is a single (one, 1) amino acid selected from the following options: His Tyr Ala
  MISC_FEATURE (100)..(100): Xaa at this position is a single (one, 1) amino acid selected from the following options: His Lys Ala
  MISC_FEATURE (102)..(102): Xaa at this position is a single (one, 1) amino acid selected from the following options: Asn Glu
  MISC_FEATURE (105)..(105): Xaa at this position is a single (one, 1) amino acid selected from the following options: Ser Val
  MISC_FEATURE (106)..(106): Xaa at this position is a single (one, 1) amino acid selected from the following options: His Ala
  MISC_FEATURE (107)..(107): Xaa at this position is a single (one, 1) amino acid selected from the following options: His Ala
  MISC_FEATURE (108)..(108): Xaa at this position is a single (one, 1) amino acid selected from the following options: Val Lys
HHHHHHDYKDDDDKXXXXRRRRRXXXXXXXXXXXXXXXXXXXXXXXXXXXXXXXXXXXXXXXXXXXXMAXXALAXRXXXGVWGXXXXQARGFLAALKKXXEXEIXXXXK

SEQ ID NO: 162 - protein, 25 aa, Artificial Sequence
  Designed; as detailed elsewhere in present application
MAVTALAARTWLGVWGVRTMQARGF

SEQ ID NO: 163 - protein, 25 aa, Artificial Sequence
  Designed; as detailed elsewhere in present application
MAGSALAVRARFGVWGMKVLQTRGF

SEQ ID NO: 164 - protein, 13 aa, Artificial Sequence
  Designed; as detailed elsewhere in present application
  MISC_FEATURE (1)..(1): Xaa at this position is a single (one, 1) amino acid (or lack thereof) selected from the following options: Gly Pro or is absent (no amino acid at this position and so this position is not present)
  MISC_FEATURE (2)..(2): Tyr or is absent (no amino acid at this position and so this position is not present)
  MISC_FEATURE (3)..(3): Gly or is absent (no amino acid at this position and so this position is not present)
  MISC_FEATURE (13)..(13): Xaa at this position is a single (one, 1) amino acid (or lack thereof) selected from the following options: Gly Pro or is absent (no amino acid at this position and so this position is not present)
XXXRKKRRQRRRX

SEQ ID NO: 165 - protein, 9 aa, Artificial Sequence
  Designed; as detailed elsewhere in present application
  MISC_FEATURE (1)..(1): Xaa at this position is a single (one, 1) amino acid (or lack thereof) selected from the following options: Gly Pro or is absent (no amino acid at this position and so this position is not present)
  MISC_FEATURE (9)..(9): Xaa at this position is a single (one, 1) amino acid (or lack thereof) selected from the following options: Gly Pro or is absent (no amino acid at this position and so this position is not present)
XRRRRRRRX

SEQ ID NO: 166 - protein, 136 aa, Artificial Sequence
  Designed; as detailed elsewhere in present application
  MISC_FEATURE (15)..(15): Xaa at this position is a single (one, 1) amino acid (or lack thereof) selected from the following options: Gly Pro or is absent (no amino acid at this position and so this position is not present)
  MISC_FEATURE (16)..(16): Tyr or is absent (no amino acid at this position and so this position is not present)
  MISC_FEATURE (17)..(17): Gly or is absent (no amino acid at this position and so this position is not present)
  MISC_FEATURE (27)..(27): Xaa at this position is a single (one, 1) amino acid (or lack thereof) selected from the following options: Gly Pro or is absent (no amino acid at this position and so this position is not present)
  MISC_FEATURE (78)..(78): Xaa at this position is a single (one, 1) amino acid selected from the following options: Glu Gln Ala
  MISC_FEATURE (100)..(100): Xaa at this position is a single (one, 1) amino acid selected from the following options: His Tyr Ala
  MISC_FEATURE (101)..(101): Xaa at this position is a single (one, 1) amino acid selected from the following options: His Lys Ala
  MISC_FEATURE (107)..(107): Xaa at this position is a single (one, 1) amino acid selected from the following options: His Ala
  MISC_FEATURE (108)..(108): Xaa at this position is a single (one, 1) amino acid selected from the following options: His Ala
HHHHHHDYKDDDDKXXXRKKRRQRRRXMAVTALAARTWLGVWGVRTMQARGFGSESGDNVRSSAGAVRDAGGAFGKRXQAEEERYFRARAKEQLAALKKXXENEISXXAKEIERLQKEIERHKQSIKKLKQSEDDD

SEQ ID NO: 167 - protein, 112 aa, Artificial Sequence
  Designed; as detailed elsewhere in present application
  MISC_FEATURE (15)..(15): Xaa at this position is a single (one, 1) amino acid (or lack thereof) selected from the following options: Gly Pro or is absent (no amino acid at this position and so this position is not present)
  MISC_FEATURE (16)..(16): Tyr or is absent (no amino acid at this position and so this position is not present)
  MISC_FEATURE (17)..(17): Gly or is absent (no amino acid at this position and so this position is not present)
  MISC_FEATURE (27)..(27): Xaa at this position is a single (one, 1) amino acid (or lack thereof) selected from the following options: Gly Pro or is absent (no amino acid at this position and so this position is not present)
  MISC_FEATURE (78)..(78): Xaa at this position is a single (one, 1) amino acid selected from the following options: Glu Gln Ala
  MISC_FEATURE (100)..(100): Xaa at this position is a single (one, 1) amino acid selected from the following options: His Tyr Ala
  MISC_FEATURE (101)..(101): Xaa at this position is a single (one, 1) amino acid selected from the following options: His Lys Ala
  MISC_FEATURE (107)..(107): Xaa at this position is a single (one, 1) amino acid selected from the following options: His Ala
  MISC_FEATURE (108)..(108): Xaa at this position is a single (one, 1) amino acid selected from the following options: His Ala
HHHHHHDYKDDDDKXXXRKKRRQRRRXMAVTALAARTWLGVWGVRTMQARGFGSESGDNVRSSAGAVRDAGGAFGKRXQAEEERYFRARAKEQLAALKKXXENEISXXAKEI

SEQ ID NO: 168 - protein, 103 aa, Artificial Sequence
  Designed; as detailed elsewhere in present application
  MISC_FEATURE (15)..(15): Xaa at this position is a single (one, 1) amino acid (or lack thereof) selected from the following options: Gly Pro or is absent (no amino acid at this position and so this position is not present)
  MISC_FEATURE (16)..(16): Tyr or is absent (no amino acid at this position and so this position is not present)
  MISC_FEATURE (17)..(17): Gly or is absent (no amino acid at this position and so this position is not present)
  MISC_FEATURE (27)..(27): Xaa at this position is a single (one, 1) amino acid (or lack thereof) selected from the following options: Gly Pro or is absent (no amino acid at this position and so this position is not present)
  MISC_FEATURE (69)..(69): Xaa at this position is a single (one, 1) amino acid selected from the following options: Glu Gln Ala
  MISC_FEATURE (91)..(91): Xaa at this position is a single (one, 1) amino acid selected from the following options: His Tyr Ala
  MISC_FEATURE (92)..(92): Xaa at this position is a single (one, 1) amino acid selected from the following options: His Lys Ala
  MISC_FEATURE (98)..(98): Xaa at this position is a single (one, 1) amino acid selected from the following options: His Ala
  MISC_FEATURE (99)..(99): Xaa at this position is a single (one, 1) amino acid selected from the following options: His Ala
HHHHHHDYKDDDDKXXXRKKRRQRRRXMAVTALAARTWLGVWGVRTMQARGFSSAGAVRDAGGAFGKRXQAEEERYFRARAKEQLAALKKXXENEISXXAKEI

SEQ ID NO: 169 - protein, 99 aa, Artificial Sequence
  Designed; as detailed elsewhere in present application
  MISC_FEATURE (15)..(15): Xaa at this position is a single (one, 1) amino acid (or lack thereof) selected from the following options: Gly Pro or is absent (no amino acid at this position and so this position is not present)
  MISC_FEATURE (16)..(16): Tyr or is absent (no amino acid at this position and so this position is not present)
  MISC_FEATURE (17)..(17): Gly or is absent (no amino acid at this position and so this position is not present)
  MISC_FEATURE (27)..(27): Xaa at this position is a single (one, 1) amino acid (or lack thereof) selected from the following options: Gly Pro or is absent (no amino acid at this position and so this position is not present)
  MISC_FEATURE (65)..(65): Xaa at this position is a single (one, 1) amino acid selected from the following options: Glu Gln Ala
  MISC_FEATURE (87)..(87): Xaa at this position is a single (one, 1) amino acid selected from the following options: His Tyr Ala
  MISC_FEATURE (88)..(88): Xaa at this position is a single (one, 1) amino acid selected from the following options: His Lys Ala
  MISC_FEATURE (94)..(94): Xaa at this position is a single (one, 1) amino acid selected from the following options: His Ala
  MISC_FEATURE (95)..(95): Xaa at this position is a single (one, 1) amino acid selected from the following options: His Ala
HHHHHHDYKDDDDKXXXRKKRRQRRRXMAVTALAARTWLGVWGVRTMQARGFAVRDAGGAFGKRXQAEEERYFRARAKEQLAALKKXXENEISXXAKEI

SEQ ID NO: 170 - protein, 87 aa, Artificial Sequence
  Designed; as detailed elsewhere in present application
  MISC_FEATURE (15)..(15): Xaa at this position is a single (one, 1) amino acid (or lack thereof) selected from the following options: Gly Pro or is absent (no amino acid at this position and so this position is not present)
  MISC_FEATURE (16)..(16): Tyr or is absent (no amino acid at this position and so this position is not present)
  MISC_FEATURE (17)..(17): Gly or is absent (no amino acid at this position and so this position is not present)
  MISC_FEATURE (27)..(27): Xaa at this position is a single (one, 1) amino acid (or lack thereof) selected from the following options: Gly Pro or is absent (no amino acid at this position and so this position is not present)
  MISC_FEATURE (66)..(66): Xaa at this position is a single (one, 1) amino acid selected from the following options: Glu Gln Ala
HHHHHHDYKDDDDKXXXRKKRRQRRRXMAVTALAARTWLGVWGVRTMQARGFGAVRDAGGAFGKRXQAEEERYFRARAKEQLAALKK

SEQ ID NO: 171 - protein, 86 aa, Artificial Sequence
  Designed; as detailed elsewhere in present application
  MISC_FEATURE (15)..(15): Xaa at this position is a single (one, 1) amino acid (or lack thereof) selected from the following options: Gly Pro or is absent (no amino acid at this position and so this position is not present)
  MISC_FEATURE (16)..(16): Tyr or is absent (no amino acid at this position and so this position is not present)
  MISC_FEATURE (17)..(17): Gly or is absent (no amino acid at this position and so this position is not present)
  MISC_FEATURE (27)..(27): Xaa at this position is a single (one, 1) amino acid (or lack thereof) selected from the following options: Gly Pro or is absent (no amino acid at this position and so this position is not present)
  MISC_FEATURE (65)..(65): Xaa at this position is a single (one, 1) amino acid selected from the following options: Glu Gln Ala
HHHHHHDYKDDDDKXXXRKKRRQRRRXMAVTALAARTWLGVWGVRTMQARGFAVRDAGGAFGKRXQAEEERYFRARAKEQLAALKK

SEQ ID NO: 172 - protein, 69 aa, Artificial Sequence
  Designed; as detailed elsewhere in present application
  MISC_FEATURE (15)..(15): Xaa at this position is a single (one, 1) amino acid (or lack thereof) selected from the following options: Gly Pro or is absent (no amino acid at this position and so this position is not present)
  MISC_FEATURE (16)..(16): Tyr or is absent (no amino acid at this position and so this position is not present)
  MISC_FEATURE (17)..(17): Gly or is absent (no amino acid at this position and so this position is not present)
  MISC_FEATURE (27)..(27): Xaa at this position is a single (one, 1) amino acid (or lack thereof) selected from the following options: Gly Pro or is absent (no amino acid at this position and so this position is not present)
HHHHHHDYKDDDDKXXXRKKRRQRRRXMAVTALAARTWLGVWGVRTMQARGFLAALKKHHENEISHHAK

SEQ ID NO: 173 - protein, 136 aa, Artificial Sequence
  Designed; as detailed elsewhere in present application
  MISC_FEATURE (15)..(15): Xaa at this position is a single (one, 1) amino acid (or lack thereof) selected from the following options: Gly Pro or is absent (no amino acid at this position and so this position is not present)
  MISC_FEATURE (16)..(16): Tyr or is absent (no amino acid at this position and so this position is not present)
  MISC_FEATURE (17)..(17): Gly or is absent (no amino acid at this position and so this position is not present)
  MISC_FEATURE (27)..(27): Xaa at this position is a single (one, 1) amino acid (or lack thereof) selected from the following options: Gly Pro or is absent (no amino acid at this position and so this position is not present)
  MISC_FEATURE (66)..(66): Xaa at this position is a single (one, 1) amino acid selected from the following options: Ser Ala
  MISC_FEATURE (78)..(78): Xaa at this position is a single (one, 1) amino acid selected from the following options: Glu Gln Ala
  MISC_FEATURE (100)..(100): Xaa at this position is a single (one, 1) amino acid selected from the following options: His Tyr Ala
  MISC_FEATURE (101)..(101): Xaa at this position is a single (one, 1) amino acid selected from the following options: His Lys Ala
  MISC_FEATURE (107)..(107): Xaa at this position is a single (one, 1) amino acid selected from the following options: His Ala
  MISC_FEATURE (108)..(108): Xaa at this position is a single (one, 1) amino acid selected from the following options: His Ala
  MISC_FEATURE (128)..(128): Xaa at this position is a single (one, 1) amino acid selected from the following options: Met Lys
  MISC_FEATURE (134)..(134): Asp or is absent (no amino acid at this position and so this position is not present)
  MISC_FEATURE (135)..(135): Asp or is absent (no amino acid at this position and so this position is not present)
  MISC_FEATURE (136)..(136): Asp or is absent (no amino acid at this position and so this position is not present)
HHHHHHDYKDDDDKXXXRKKRRQRRRXMAVTALAARTWLGVWGVRTMQARGFGSDQSENVDRGAGXIREAGGAFGKRXQAEEERYFRAQSREQLAALKKXXEEEIVXXKKEIERLQKEIERHKQKIKXLKHDDXXX

SEQ ID NO: 174 - protein, 112 aa, Artificial Sequence
  Designed; as detailed elsewhere in present application
  MISC_FEATURE (15)..(15): Xaa at this position is a single (one, 1) amino acid (or lack thereof) selected from the following options: Gly Pro or is absent (no amino acid at this position and so this position is not present)
  MISC_FEATURE (16)..(16): Tyr or is absent (no amino acid at this position and so this position is not present)
  MISC_FEATURE (17)..(17): Gly or is absent (no amino acid at this position and so this position is not present)
  MISC_FEATURE (27)..(27): Xaa at this position is a single (one, 1) amino acid (or lack thereof) selected from the following options: Gly Pro or is absent (no amino acid at this position and so this position is not present)
  MISC_FEATURE (66)..(66): Xaa at this position is a single (one, 1) amino acid selected from the following options: Ser Ala
  MISC_FEATURE (78)..(78): Xaa at this position is a single (one, 1) amino acid selected from the following options: Glu Gln Ala
  MISC_FEATURE (100)..(100): Xaa at this position is a single (one, 1) amino acid selected from the following options: His Tyr Ala
  MISC_FEATURE (101)..(101): Xaa at this position is a single (one, 1) amino acid selected from the following options: His Lys Ala
  MISC_FEATURE (107)..(107): Xaa at this position is a single (one, 1) amino acid selected from the following options: His Ala
  MISC_FEATURE (108)..(108): Xaa at this position is a single (one, 1) amino acid selected from the following options: His Ala
HHHHHHDYKDDDDKXXXRKKRRQRRRXMAVTALAARTWLGVWGVRTMQARGFGSDQSENVDRGAGXIREAGGAFGKRXQAEEERYFRAQSREQLAALKKXXEEEIVXXKKEI

SEQ ID NO: 175 - protein, 103 aa, Artificial Sequence
  Designed; as detailed elsewhere in present application
  MISC_FEATURE (15)..(15): Xaa at this position is a single (one, 1) amino acid (or lack thereof) selected from the following options: Gly Pro or is absent (no amino acid at this position and so this position is not present)
  MISC_FEATURE (16)..(16): Tyr or is absent (no amino acid at this position and so this position is not present)
  MISC_FEATURE (17)..(17): Gly or is absent (no amino acid at this position and so this position is not present)
  MISC_FEATURE (27)..(27): Xaa at this position is a single (one, 1) amino acid (or lack thereof) selected from the following options: Gly Pro or is absent (no amino acid at this position and so this position is not present)
  MISC_FEATURE (57)..(57): Xaa at this position is a single (one, 1) amino acid selected from the following options: Ser Ala
  MISC_FEATURE (69)..(69): Xaa at this position is a single (one, 1) amino acid selected from the following options: Glu Gln Ala
  MISC_FEATURE (91)..(91): Xaa at this position is a single (one, 1) amino acid selected from the following options: His Tyr Ala
  MISC_FEATURE (92)..(92): Xaa at this position is a single (one, 1) amino acid selected from the following options: His Lys Ala
  MISC_FEATURE (98)..(98): Xaa at this position is a single (one, 1) amino acid selected from the following options: His Ala
  MISC_FEATURE (99)..(99): Xaa at this position is a single (one, 1) amino acid selected from the following options: His Ala
HHHHHHDYKDDDDKXXXRKKRRQRRRXMAVTALAARTWLGVWGVRTMQARGFRGAGXIREAGGAFGKRXQAEEERYFRAQSREQLAALKKXXEEEIVXXKKEI

SEQ ID NO: 176 - protein, 99 aa, Artificial Sequence
  Designed; as detailed elsewhere in present application
  MISC_FEATURE (15)..(15): Xaa at this position is a single (one, 1) amino acid (or lack thereof) selected from the following options: Gly Pro or is absent (no amino acid at this position and so this position is not present)
  MISC_FEATURE (16)..(16): Tyr or is absent (no amino acid at this position and so this position is not present)
  MISC_FEATURE (17)..(17): Gly or is absent (no amino acid at this position and so this position is not present)
  MISC_FEATURE (27)..(27): Xaa at this position is a single (one, 1) amino acid (or lack thereof) selected from the following options: Gly Pro or is absent (no amino acid at this position and so this position is not present)
  MISC_FEATURE (53)..(53): Xaa at this position is a single (one, 1) amino acid selected from the following options: Ser Ala
  MISC_FEATURE (65)..(65): Xaa at this position is a single (one, 1) amino acid selected from the following options: Glu Gln Ala
  MISC_FEATURE (87)..(87): Xaa at this position is a single (one, 1) amino acid selected from the following options: His Tyr Ala
  MISC_FEATURE (88)..(88): Xaa at this position is a single (one, 1) amino acid selected from the following options: His Lys Ala
  MISC_FEATURE (94)..(94): Xaa at this position is a single (one, 1) amino acid selected from the following options: His Ala
  MISC_FEATURE (95)..(95): Xaa at this position is a single (one, 1) amino acid selected from the following options: His Ala
HHHHHHDYKDDDDKXXXRKKRRQRRRXMAVTALAARTWLGVWGVRTMQARGFXIREAGGAFGKRXQAEEERYFRAQSREQLAALKKXXEEEIVXXKKEI

SEQ ID NO: 177 - protein, 87 aa, Artificial Sequence
  Designed; as detailed elsewhere in present application
  MISC_FEATURE (15)..(15): Xaa at this position is a single (one, 1) amino acid (or lack thereof) selected from the following options: Gly Pro or is absent (no amino acid at this position and so this position is not present)
  MISC_FEATURE (16)..(16): Tyr or is absent (no amino acid at this position and so this position is not present)
  MISC_FEATURE (17)..(17): Gly or is absent (no amino acid at this position and so this position is not present)
  MISC_FEATURE (27)..(27): Xaa at this position is a single (one, 1) amino acid (or lack thereof) selected from the following options: Gly Pro or is absent (no amino acid at this position and so this position is not present)
  MISC_FEATURE (54)..(54): Xaa at this position is a single (one, 1) amino acid selected from the following options: Ser Ala
  MISC_FEATURE (66)..(66): Xaa at this position is a single (one, 1) amino acid selected from the following options: Glu Gln Ala
HHHHHHDYKDDDDKXXXRKKRRQRRRXMAVTALAARTWLGVWGVRTMQARGFGXIREAGGAFGKRXQAEEERYFRAQSREQLAALKK

SEQ ID NO: 178 - protein, 86 aa, Artificial Sequence
  Designed; as detailed elsewhere in present application
  MISC_FEATURE (15)..(15): Xaa at this position is a single (one, 1) amino acid (or lack thereof) selected from the following options: Gly Pro or is absent (no amino acid at this position and so this position is not present)
  MISC_FEATURE (16)..(16): Tyr or is absent (no amino acid at this position and so this position is not present)
  MISC_FEATURE (17)..(17): Gly or is absent (no amino acid at this position and so this position is not present)
  MISC_FEATURE (27)..(27): Xaa at this position is a single (one, 1) amino acid (or lack thereof) selected from the following options: Gly Pro or is absent (no amino acid at this position and so this position is not present)
  MISC_FEATURE (53)..(53): Xaa at this position is a single (one, 1) amino acid selected from the following options: Ser Ala
  MISC_FEATURE (65)..(65): Xaa at this position is a single (one, 1) amino acid selected from the following options: Glu Gln Ala
HHHHHHDYKDDDDKXXXRKKRRQRRRXMAVTALAARTWLGVWGVRTMQARGFXIREAGGAFGKRXQAEEERYFRAQSREQLAALKK

SEQ ID NO: 179 - protein, 69 aa, Artificial Sequence
  Designed; as detailed elsewhere in present application
  MISC_FEATURE (15)..(15): Xaa at this position is a single (one, 1) amino acid (or lack thereof) selected from the following options: Gly Pro or is absent (no amino acid at this position and so this position is not present)
  MISC_FEATURE (16)..(16): Tyr or is absent (no amino acid at this position and so this position is not present)
  MISC_FEATURE (17)..(17): Gly or is absent (no amino acid at this position and so this position is not present)
  MISC_FEATURE (27)..(27): Xaa at this position is a single (one, 1) amino acid (or lack thereof) selected from the following options: Gly Pro or is absent (no amino acid at this position and so this position is not present)
HHHHHHDYKDDDDKXXXRKKRRQRRRXMAVTALAARTWLGVWGVRTMQARGFLAALKKHHEEEIVHHKK

SEQ ID NO: 180 - protein, 136 aa, Artificial Sequence
  Designed; as detailed elsewhere in present application
  MISC_FEATURE (15)..(15): Xaa at this position is a single (one, 1) amino acid (or lack thereof) selected from the following options: Gly Pro or is absent (no amino acid at this position and so this position is not present)
  MISC_FEATURE (16)..(16): Tyr or is absent (no amino acid at this position and so this position is not present)
  MISC_FEATURE (17)..(17): Gly or is absent (no amino acid at this position and so this position is not present)
  MISC_FEATURE (27)..(27): Xaa at this position is a single (one, 1) amino acid (or lack thereof) selected from the following options: Gly Pro or is absent (no amino acid at this position and so this position is not present)
  MISC_FEATURE (78)..(78): Xaa at this position is a single (one, 1) amino acid selected from the following options: Glu Gln Ala
  MISC_FEATURE (100)..(100): Xaa at this position is a single (one, 1) amino acid selected from the following options: His Tyr Ala
  MISC_FEATURE (101)..(101): Xaa at this position is a single (one, 1) amino acid selected from the following options: His Lys Ala
  MISC_FEATURE (107)..(107): Xaa at this position is a single (one, 1) amino acid selected from the following options: His Ala
  MISC_FEATURE (108)..(108): Xaa at this position is a single (one, 1) amino acid selected from the following options: His Ala
  MISC_FEATURE (135)..(135): Asp or is absent (no amino acid at this position and so this position is not present)
  MISC_FEATURE (136)..(136): Asp or is absent (no amino acid at this position and so this position is not present)
HHHHHHDYKDDDDKXXXRKKRRQRRRXMAVTALAARTWLGVWGVRTMQARGFGSESADNLGSSAGAIRDAGGAFGKKXQAEEERYFRARAKEQLAALKKXXENEISXXVKEIEHLQKEIERHKQSIKKLKHDDDXX

SEQ ID NO: 181 - protein, 112 aa, Artificial Sequence
  Designed; as detailed elsewhere in present application
  MISC_FEATURE (15)..(15): Xaa at this position is a single (one, 1) amino acid (or lack thereof) selected from the following options: Gly Pro or is absent (no amino acid at this position and so this position is not present)
  MISC_FEATURE (16)..(16): Tyr or is absent (no amino acid at this position and so this position is not present)
  MISC_FEATURE (17)..(17): Gly or is absent (no amino acid at this position and so this position is not present)
  MISC_FEATURE (27)..(27): Xaa at this position is a single (one, 1) amino acid (or lack thereof) selected from the following options: Gly Pro or is absent (no amino acid at this position and so this position is not present)
  MISC_FEATURE (78)..(78): Xaa at this position is a single (one, 1) amino acid selected from the following options: Glu Gln Ala
  MISC_FEATURE (100)..(100): Xaa at this position is a single (one, 1) amino acid selected from the following options: His Tyr Ala
  MISC_FEATURE (101)..(101): Xaa at this position is a single (one, 1) amino acid selected from the following options: His Lys Ala
  MISC_FEATURE (107)..(107): Xaa at this position is a single (one, 1) amino acid selected from the following options: His Ala
  MISC_FEATURE (108)..(108): Xaa at this position is a single (one, 1) amino acid selected from the following options: His Ala
HHHHHHDYKDDDDKXXXRKKRRQRRRXMAVTALAARTWLGVWGVRTMQARGFGSESADNLGSSAGAIRDAGGAFGKKXQAEEERYFRARAKEQLAALKKXXENEISXXVKEI

SEQ ID NO: 182 - protein, 103 aa, Artificial Sequence
  Designed; as detailed elsewhere in present application
  MISC_FEATURE (15)..(15): Xaa at this position is a single (one, 1) amino acid (or lack thereof) selected from the following options: Gly Pro or is absent (no amino acid at this position and so this position is not present)
  MISC_FEATURE (16)..(16): Tyr or is absent (no amino acid at this position and so this position is not present)
  MISC_FEATURE (17)..(17): Gly or is absent (no amino acid at this position and so this position is not present)
  MISC_FEATURE (27)..(27): Xaa at this position is a single (one, 1) amino acid (or lack thereof) selected from the following options: Gly Pro or is absent (no amino acid at this position and so this position is not present)
  MISC_FEATURE (69)..(69): Xaa at this position is a single (one, 1) amino acid selected from the following options: Glu Gln Ala
  MISC_FEATURE (91)..(91): Xaa at this position is a single (one, 1) amino acid selected from the following options: His Tyr Ala
  MISC_FEATURE (92)..(92): Xaa at this position is a single (one, 1) amino acid selected from the following options: His Lys Ala
  MISC_FEATURE (98)..(98): Xaa at this position is a single (one, 1) amino acid selected from the following options: His Ala
  MISC_FEATURE (99)..(99): Xaa at this position is a single (one, 1) amino acid selected from the following options: His Ala
HHHHHHDYKDDDDKXXXRKKRRQRRRXMAVTALAARTWLGVWGVRTMQARGFSSAGAIRDAGGAFGKKXQAEEERYFRARAKEQLAALKKXXENEISXXVKEI

SEQ ID NO: 183 - protein, 99 aa, Artificial Sequence
  Designed; as detailed elsewhere in present application
  MISC_FEATURE (15)..(15): Xaa at this position is a single (one, 1) amino acid (or lack thereof) selected from the following options: Gly Pro or is absent (no amino acid at this position and so this position is not present)
  MISC_FEATURE (16)..(16): Tyr or is absent (no amino acid at this position and so this position is not present)
  MISC_FEATURE (17)..(17): Gly or is absent (no amino acid at this position and so this position is not present)
  MISC_FEATURE (27)..(27): Xaa at this position is a single (one, 1) amino acid (or lack thereof) selected from the following options: Gly Pro or is absent (no amino acid at this position and so this position is not present)
  MISC_FEATURE (65)..(65): Xaa at this position is a single (one, 1) amino acid selected from the following options: Glu Gln Ala
  MISC_FEATURE (87)..(87): Xaa at this position is a single (one, 1) amino acid selected from the following options: His Tyr Ala
  MISC_FEATURE (88)..(88): Xaa at this position is a single (one, 1) amino acid selected from the following options: His Lys Ala
  MISC_FEATURE (94)..(94): Xaa at this position is a single (one, 1) amino acid selected from the following options: His Ala
  MISC_FEATURE (95)..(95): Xaa at this position is a single (one, 1) amino acid selected from the following options: His Ala
HHHHHHDYKDDDDKXXXRKKRRQRRRXMAVTALAARTWLGVWGVRTMQARGFAIRDAGGAFGKKXQAEEERYFRARAKEQLAALKKXXENEISXXVKEI

SEQ ID NO: 184 - protein, 87 aa, Artificial Sequence
  Designed; as detailed elsewhere in present application
  MISC_FEATURE (15)..(15): Xaa at this position is a single (one, 1) amino acid (or lack thereof) selected from the following options: Gly Pro or is absent (no amino acid at this position and so this position is not present)
  MISC_FEATURE (16)..(16): Tyr or is absent (no amino acid at this position and so this position is not present)
  MISC_FEATURE (17)..(17): Gly or is absent (no amino acid at this position and so this position is not present)
  MISC_FEATURE (27)..(27): Xaa at this position is a single (one, 1) amino acid (or lack thereof) selected from the following options: Gly Pro or is absent (no amino acid at this position and so this position is not present)
  MISC_FEATURE (66)..(66): Xaa at this position is a single (one, 1) amino acid selected from the following options: Glu Gln Ala
HHHHHHDYKDDDDKXXXRKKRRQRRRXMAVTALAARTWLGVWGVRTMQARGFGAIRDAGGAFGKKXQAEEERYFRARAKEQLAALKK

SEQ ID NO: 185 - protein, 86 aa, Artificial Sequence
  Designed; as detailed elsewhere in present application
  MISC_FEATURE (15)..(15): Xaa at this position is a single (one, 1) amino acid (or lack thereof) selected from the following options: Gly Pro or is absent (no amino acid at this position and so this position is not present)
  MISC_FEATURE (16)..(16): Tyr or is absent (no amino acid at this position and so this position is not present)
  MISC_FEATURE (17)..(17): Gly or is absent (no amino acid at this position and so this position is not present)
  MISC_FEATURE (27)..(27): Xaa at this position is a single (one, 1) amino acid (or lack thereof) selected from the following options: Gly Pro or is absent (no amino acid at this position and so this position is not present)
  MISC_FEATURE (65)..(65): Xaa at this position is a single (one, 1) amino acid selected from the following options: Glu Gln Ala
HHHHHHDYKDDDDKXXXRKKRRQRRRXMAVTALAARTWLGVWGVRTMQARGFAIRDAGGAFGKKXQAEEERYFRARAKEQLAALKK

SEQ ID NO: 186 - protein, 69 aa, Artificial Sequence
  Designed; as detailed elsewhere in present application
  MISC_FEATURE (15)..(15): Xaa at this position is a single (one, 1) amino acid (or lack thereof) selected from the following options: Gly Pro or is absent (no amino acid at this position and so this position is not present)
  MISC_FEATURE (16)..(16): Tyr or is absent (no amino acid at this position and so this position is not present)
  MISC_FEATURE (17)..(17): Gly or is absent (no amino acid at this position and so this position is not present)
  MISC_FEATURE (27)..(27): Xaa at this position is a single (one, 1) amino acid (or lack thereof) selected from the following options: Gly Pro or is absent (no amino acid at this position and so this position is not present)
HHHHHHDYKDDDDKXXXRKKRRQRRRXMAVTALAARTWLGVWGVRTMQARGFLAALKKHHENEISHHVK

SEQ ID NO: 187 - protein, 136 aa, Artificial Sequence
  Designed; as detailed elsewhere in present application
  MISC_FEATURE (15)..(15): Xaa at this position is a single (one, 1) amino acid (or lack thereof) selected from the following options: Gly Pro or is absent (no amino acid at this position and so this position is not present)
  MISC_FEATURE (16)..(16): Tyr or is absent (no amino acid at this position and so this position is not present)
  MISC_FEATURE (17)..(17): Gly or is absent (no amino acid at this position and so this position is not present)
  MISC_FEATURE (27)..(27): Xaa at this position is a single (one, 1) amino acid (or lack thereof) selected from the following options: Gly Pro or is absent (no amino acid at this position and so this position is not present)
  MISC_FEATURE (66)..(66): Xaa at this position is a single (one, 1) amino acid selected from the following options: Thr Ala
  MISC_FEATURE (78)..(78): Xaa at this position is a single (one, 1) amino acid selected from the following options: Glu Gln Ala
  MISC_FEATURE (100)..(100): Xaa at this position is a single (one, 1) amino acid selected from the following options: His Tyr Ala
  MISC_FEATURE (101)..(101): Xaa at this position is a single (one, 1) amino acid selected from the following options: His Lys Ala
  MISC_FEATURE (107)..(107): Xaa at this position is a single (one, 1) amino acid selected from the following options: His Ala
  MISC_FEATURE (108)..(108): Xaa at this position is a single (one, 1) amino acid selected from the following options: His Ala
  MISC_FEATURE (135)..(135): Asp or is absent (no amino acid at this position and so this position is not present)
  MISC_FEATURE (135)..(135): Asp or is absent (no amino acid at this position and so this position is not present)
  MISC_FEATURE (136)..(136): Asp or is absent (no amino acid at this position and so this position is not present)
HHHHHHDYKDDDDKXXXRKKRRQRRRXMAVTALAARTWLGVWGVRTMQARGFGSEPADNLGSSEAXVWNAGVDFRKRXQAKGERYLRARAKEQLAALKKXXENEISXXVKEIEHLQKEIERHKQSIKKLKHDDDXX

SEQ ID NO: 188 - protein, 112 aa, Artificial Sequence
  Designed; as detailed elsewhere in present application
  MISC_FEATURE (15)..(15): Xaa at this position is a single (one, 1) amino acid (or lack thereof) selected from the following options: Gly Pro or is absent (no amino acid at this position and so this position is not present)
  MISC_FEATURE (16)..(16): Tyr or is absent (no amino acid at this position and so this position is not present)
  MISC_FEATURE (17)..(17): Gly or is absent (no amino acid at this position and so this position is not present)
  MISC_FEATURE (27)..(27): Xaa at this position is a single (one, 1) amino acid (or lack thereof) selected from the following options: Gly Pro or is absent (no amino acid at this position and so this position is not present)
  MISC_FEATURE (66)..(66): Xaa at this position is a single (one, 1) amino acid selected from the following options: Thr Ala
  MISC_FEATURE (78)..(78): Xaa at this position is a single (one, 1) amino acid selected from the following options: Glu Gln Ala
  MISC_FEATURE (100)..(100): Xaa at this position is a single (one, 1) amino acid selected from the following options: His Tyr Ala
  MISC_FEATURE (101)..(101): Xaa at this position is a single (one, 1) amino acid selected from the following options: His Lys Ala
  MISC_FEATURE (107)..(107): Xaa at this position is a single (one, 1) amino acid selected from the following options: His Ala
  MISC_FEATURE (108)..(108): Xaa at this position is a single (one, 1) amino acid selected from the following options: His Ala
HHHHHHDYKDDDDKXXXRKKRRQRRRXMAVTALAARTWLGVWGVRTMQARGFGSEPADNLGSSEAXVWNAGVDFRKRXQAKGERYLRARAKEQLAALKKXXENEISXXVKEI

SEQ ID NO: 189 - protein, 99 aa, Artificial Sequence
  Designed; as detailed elsewhere in present application
  MISC_FEATURE (15)..(15): Xaa at this position is a single (one, 1) amino acid (or lack thereof) selected from the following options: Gly Pro or is absent (no amino acid at this position and so this position is not present)
  MISC_FEATURE (16)..(16): Tyr or is absent (no amino acid at this position and so this position is not present)
  MISC_FEATURE (17)..(17): Gly or is absent (no amino acid at this position and so this position is not present)
  MISC_FEATURE (27)..(27): Xaa at this position is a single (one, 1) amino acid (or lack thereof) selected from the following options: Gly Pro or is absent (no amino acid at this position and so this position is not present)
  MISC_FEATURE (53)..(53): Xaa at this position is a single (one, 1) amino acid selected from the following options: Thr Ala
  MISC_FEATURE (65)..(65): Xaa at this position is a single (one, 1) amino acid selected from the following options: Glu Gln Ala
  MISC_FEATURE (87)..(87): Xaa at this position is a single (one, 1) amino acid selected from the following options: His Tyr Ala
  MISC_FEATURE (88)..(88): Xaa at this position is a single (one, 1) amino acid selected from the following options: His Lys Ala
  MISC_FEATURE (94)..(94): Xaa at this position is a single (one, 1) amino acid selected from the following options: His Ala
  MISC_FEATURE (95)..(95): Xaa at this position is a single (one, 1) amino acid selected from the following options: His Ala
HHHHHHDYKDDDDKXXXRKKRRQRRRXMAVTALAARTWLGVWGVRTMQARGFXVWNAGVDFRKRXQAKGERYLRARAKEQLAALKKXXENEISXXVKEI

SEQ ID NO: 190 - protein, 87 aa, Artificial Sequence
  Designed; as detailed elsewhere in present application
  MISC_FEATURE (15)..(15): Xaa at this position is a single (one, 1) amino acid (or lack thereof) selected from the following options: Gly Pro or is absent (no amino acid at this position and so this position is not present)
  MISC_FEATURE (16)..(16): Tyr or is absent (no amino acid at this position and so this position is not present)
  MISC_FEATURE (17)..(17): Gly or is absent (no amino acid at this position and so this position is not present)
  MISC_FEATURE (27)..(27): Xaa at this position is a single (one, 1) amino acid (or lack thereof) selected from the following options: Gly Pro or is absent (no amino acid at this position and so this position is not present)
  MISC_FEATURE (54)..(54): Xaa at this position is a single (one, 1) amino acid selected from the following options: Thr Ala
  MISC_FEATURE (66)..(66): Xaa at this position is a single (one, 1) amino acid selected from the following options: Glu Gln Ala
HHHHHHDYKDDDDKXXXRKKRRQRRRXMAVTALAARTWLGVWGVRTMQARGFAXVWNAGVDFRKRXQAKGERYLRARAKEQLAALKK

SEQ ID NO: 191 - protein, 86 aa, Artificial Sequence
  Designed; as detailed elsewhere in present application
  MISC_FEATURE (15)..(15): Xaa at this position is a single (one, 1) amino acid (or lack thereof) selected from the following options: Gly Pro or is absent (no amino acid at this position and so this position is not present)
  MISC_FEATURE (16)..(16): Tyr or is absent (no amino acid at this position and so this position is not present)
  MISC_FEATURE (17)..(17): Gly or is absent (no amino acid at this position and so this position is not present)
  MISC_FEATURE (27)..(27): Xaa at this position is a single (one, 1) amino acid (or lack thereof) selected from the following options: Gly Pro or is absent (no amino acid at this position and so this position is not present)
  MISC_FEATURE (53)..(53): Xaa at this position is a single (one, 1) amino acid selected from the following options: Thr Ala
  MISC_FEATURE (65)..(65): Xaa at this position is a single (one, 1) amino acid selected from the following options: Glu Gln Ala
HHHHHHDYKDDDDKXXXRKKRRQRRRXMAVTALAARTWLGVWGVRTMQARGFXVWNAGVDFRKRXQAKGERYLRARAKEQLAALKK

SEQ ID NO: 192 - protein, 69 aa, Artificial Sequence; identical to SEQ ID NO: 186
  Designed; as detailed elsewhere in present application
  MISC_FEATURE (15)..(15): Xaa at this position is a single (one, 1) amino acid (or lack thereof) selected from the following options: Gly Pro or is absent (no amino acid at this position and so this position is not present)
  MISC_FEATURE (15)..(15): Xaa at this position is a single (one, 1) amino acid (or lack thereof) selected from the following options: Gly Pro or is absent (no amino acid at this position and so this position is not present)
  MISC_FEATURE (16)..(16): Tyr or is absent (no amino acid at this position and so this position is not present)
  MISC_FEATURE (17)..(17): Gly or is absent (no amino acid at this position and so this position is not present)
  MISC_FEATURE (27)..(27): Xaa at this position is a single (one, 1) amino acid (or lack thereof) selected from the following options: Gly Pro or is absent (no amino acid at this position and so this position is not present)

SEQ ID NO: 193 - protein, 136 aa, Artificial Sequence
  Designed; as detailed elsewhere in present application
  MISC_FEATURE (15)..(15): Xaa at this position is a single (one, 1) amino acid (or lack thereof) selected from the following options: Gly Pro or is absent (no amino acid at this position and so this position is not present)
  MISC_FEATURE (16)..(16): Tyr or is absent (no amino acid at this position and so this position is not present)
  MISC_FEATURE (17)..(17): Gly or is absent (no amino acid at this position and so this position is not present)
  MISC_FEATURE (27)..(27): Xaa at this position is a single (one, 1) amino acid (or lack thereof) selected from the following options: Gly Pro or is absent (no amino acid at this position and so this position is not present)
  MISC_FEATURE (78)..(78): Xaa at this position is a single (one, 1) amino acid selected from the following options: Glu Gln Ala
  MISC_FEATURE (100)..(100): Xaa at this position is a single (one, 1) amino acid selected from the following options: His Tyr Ala
  MISC_FEATURE (101)..(101): Xaa at this position is a single (one, 1) amino acid selected from the following options: His Lys Ala
  MISC_FEATURE (107)..(107): Xaa at this position is a single (one, 1) amino acid selected from the following options: His Ala
  MISC_FEATURE (108)..(108): Xaa at this position is a single (one, 1) amino acid selected from the following options: His Ala
  MISC_FEATURE (135)..(135): Asp or is absent (no amino acid at this position and so this position is not present)
  MISC_FEATURE (136)..(136): Asp or is absent (no amino acid at this position and so this position is not present)
HHHHHHDYKDDDDKXXXRKKRRQRRRXMAVTALAARTWLGVWGVRTMQARGFGSESADNLGSSAGAVRDAGGAFGKKXQAEEERYFRARAKEQLAALKKXXENEISXXVKEIEHLQKEIERHKQSIKKLKHDDDXX

SEQ ID NO: 194 - protein, 112 aa, Artificial Sequence
  Designed; as detailed elsewhere in present application
  MISC_FEATURE (15)..(15): Xaa at this position is a single (one, 1) amino acid (or lack thereof) selected from the following options: Gly Pro or is absent (no amino acid at this position and so this position is not present)
  MISC_FEATURE (16)..(16): Tyr or is absent (no amino acid at this position and so this position is not present)
  MISC_FEATURE (17)..(17): Gly or is absent (no amino acid at this position and so this position is not present)
  MISC_FEATURE (27)..(27): Xaa at this position is a single (one, 1) amino acid (or lack thereof) selected from the following options: Gly Pro or is absent (no amino acid at this position and so this position is not present)
  MISC_FEATURE (78)..(78): Xaa at this position is a single (one, 1) amino acid selected from the following options: Glu Gln Ala
  MISC_FEATURE (100)..(100): Xaa at this position is a single (one, 1) amino acid selected from the following options: His Tyr Ala
  MISC_FEATURE (101)..(101): Xaa at this position is a single (one, 1) amino acid selected from the following options: His Lys Ala
  MISC_FEATURE (107)..(107): Xaa at this position is a single (one, 1) amino acid selected from the following options: His Ala
  MISC_FEATURE (108)..(108): Xaa at this position is a single (one, 1) amino acid selected from the following options: His Ala
HHHHHHDYKDDDDKXXXRKKRRQRRRXMAVTALAARTWLGVWGVRTMQARGFGSESADNLGSSAGAVRDAGGAFGKKXQAEEERYFRARAKEQLAALKKXXENEISXXVKEI

SEQ ID NO: 195 - protein, 99 aa, Artificial Sequence
  Designed; as detailed elsewhere in present application
  MISC_FEATURE (15)..(15): Xaa at this position is a single (one, 1) amino acid (or lack thereof) selected from the following options: Gly Pro or is absent (no amino acid at this position and so this position is not present)
  MISC_FEATURE (16)..(16): Tyr or is absent (no amino acid at this position and so this position is not present)
  MISC_FEATURE (17)..(17): Gly or is absent (no amino acid at this position and so this position is not present)
  MISC_FEATURE (27)..(27): Xaa at this position is a single (one, 1) amino acid (or lack thereof) selected from the following options: Gly Pro or is absent (no amino acid at this position and so this position is not present)
  MISC_FEATURE (65)..(65): Xaa at this position is a single (one, 1) amino acid selected from the following options: Glu Gln Ala
  MISC_FEATURE (87)..(87): Xaa at this position is a single (one, 1) amino acid selected from the following options: His Tyr Ala
  MISC_FEATURE (88)..(88): Xaa at this position is a single (one, 1) amino acid selected from the following options: His Lys Ala
  MISC_FEATURE (94)..(94): Xaa at this position is a single (one, 1) amino acid selected from the following options: His Ala
  MISC_FEATURE (95)..(95): Xaa at this position is a single (one, 1) amino acid selected from the following options: His Ala
HHHHHHDYKDDDDKXXXRKKRRQRRRXMAVTALAARTWLGVWGVRTMQARGFAVRDAGGAFGKKXQAEEERYFRARAKEQLAALKKXXENEISXXVKEI

SEQ ID NO: 196 - protein, 87 aa, Artificial Sequence
  Designed; as detailed elsewhere in present application
  MISC_FEATURE (15)..(15): Xaa at this position is a single (one, 1) amino acid (or lack thereof) selected from the following options: Gly Pro or is absent (no amino acid at this position and so this position is not present)
  MISC_FEATURE (16)..(16): Tyr or is absent (no amino acid at this position and so this position is not present)
  MISC_FEATURE (17)..(17): Gly or is absent (no amino acid at this position and so this position is not present)
  MISC_FEATURE (27)..(27): Xaa at this position is a single (one, 1) amino acid (or lack thereof) selected from the following options: Gly Pro or is absent (no amino acid at this position and so this position is not present)
  MISC_FEATURE (66)..(66): Xaa at this position is a single (one, 1) amino acid selected from the following options: Glu Gln Ala
HHHHHHDYKDDDDKXXXRKKRRQRRRXMAVTALAARTWLGVWGVRTMQARGFGAVRDAGGAFGKKXQAEEERYFRARAKEQLAALKK

SEQ ID NO: 197 - protein, 86 aa, Artificial Sequence
  Designed; as detailed elsewhere in present application
  MISC_FEATURE (15)..(15): Xaa at this position is a single (one, 1) amino acid (or lack thereof) selected from the following options: Gly Pro or is absent (no amino acid at this position and so this position is not present)
  MISC_FEATURE (16)..(16): Tyr or is absent (no amino acid at this position and so this position is not present)
  MISC_FEATURE (17)..(17): Gly or is absent (no amino acid at this position and so this position is not present)
  MISC_FEATURE (27)..(27): Xaa at this position is a single (one, 1) amino acid (or lack thereof) selected from the following options: Gly Pro or is absent (no amino acid at this position and so this position is not present)
  MISC_FEATURE (65)..(65): Xaa at this position is a single (one, 1) amino acid selected from the following options: Glu Gln Ala
HHHHHHDYKDDDDKXXXRKKRRQRRRXMAVTALAARTWLGVWGVRTMQARGFAVRDAGGAFGKKXQAEEERYFRARAKEQLAALKK

SEQ ID NO: 198 - protein, 69 aa, Artificial Sequence; identical to SEQ ID NO: 186
  Designed; as detailed elsewhere in present application
  MISC_FEATURE (15)..(15): Xaa at this position is a single (one, 1) amino acid (or lack thereof) selected from the following options: Gly Pro or is absent (no amino acid at this position and so this position is not present)
  MISC_FEATURE (16)..(16): Tyr or is absent (no amino acid at this position and so this position is not present)
  MISC_FEATURE (17)..(17): Gly or is absent (no amino acid at this position and so this position is not present)
  MISC_FEATURE (27)..(27): Xaa at this position is a single (one, 1) amino acid (or lack thereof) selected from the following options: Gly Pro or is absent (no amino acid at this position and so this position is not present)

SEQ ID NO: 199 - protein, 136 aa, Artificial Sequence
  Designed; as detailed elsewhere in present application
  MISC_FEATURE (15)..(15): Xaa at this position is a single (one, 1) amino acid (or lack thereof) selected from the following options: Gly Pro or is absent (no amino acid at this position and so this position is not present)
  MISC_FEATURE (16)..(16): Tyr or is absent (no amino acid at this position and so this position is not present)
  MISC_FEATURE (17)..(17): Gly or is absent (no amino acid at this position and so this position is not present)
  MISC_FEATURE (27)..(27): Xaa at this position is a single (one, 1) amino acid (or lack thereof) selected from the following options: Gly Pro or is absent (no amino acid at this position and so this position is not present)
  MISC_FEATURE (66)..(66): Xaa at this position is a single (one, 1) amino acid selected from the following options: Ser Ala
  MISC_FEATURE (78)..(78): Xaa at this position is a single (one, 1) amino acid selected from the following options: Glu Gln Ala
  MISC_FEATURE (100)..(100): Xaa at this position is a single (one, 1) amino acid selected from the following options: His Tyr Ala
  MISC_FEATURE (101)..(101): Xaa at this position is a single (one, 1) amino acid selected from the following options: His Lys Ala
  MISC_FEATURE (107)..(107): Xaa at this position is a single (one, 1) amino acid selected from the following options: His Ala
  MISC_FEATURE (108)..(108): Xaa at this position is a single (one, 1) amino acid selected from the following options: His Ala
  MISC_FEATURE (136)..(136): Asp or is absent (no amino acid at this position and so this position is not present)
HHHHHHDYKDDDDKXXXRKKRRQRRRXMAVTALAARTWLGVWGVRTMQARGFLGSGAGKGGGGGGXIREAGGAFGKRXAAHEERYFREKEREQLASLREXXEEEIDXXKKEIQRLQKEIDRHKNKIKKLKGDDDDX

SEQ ID NO: 200 - protein, 112 aa, Artificial Sequence
  Designed; as detailed elsewhere in present application
  MISC_FEATURE (15)..(15): Xaa at this position is a single (one, 1) amino acid (or lack thereof) selected from the following options: Gly Pro or is absent (no amino acid at this position and so this position is not present)
  MISC_FEATURE (16)..(16): Tyr or is absent (no amino acid at this position and so this position is not present)
  MISC_FEATURE (17)..(17): Gly or is absent (no amino acid at this position and so this position is not present)
  MISC_FEATURE (27)..(27): Xaa at this position is a single (one, 1) amino acid (or lack thereof) selected from the following options: Gly Pro or is absent (no amino acid at this position and so this position is not present)
  MISC_FEATURE (66)..(66): Xaa at this position is a single (one, 1) amino acid selected from the following options: Ser Ala
  MISC_FEATURE (78)..(78): Xaa at this position is a single (one, 1) amino acid selected from the following options: Glu Gln Ala
  MISC_FEATURE (100)..(100): Xaa at this position is a single (one, 1) amino acid selected from the following options: His Tyr Ala
  MISC_FEATURE (101)..(101): Xaa at this position is a single (one, 1) amino acid selected from the following options: His Lys Ala
  MISC_FEATURE (107)..(107): Xaa at this position is a single (one, 1) amino acid selected from the following options: His Ala
  MISC_FEATURE (108)..(108): Xaa at this position is a single (one, 1) amino acid selected from the following options: His Ala
HHHHHHDYKDDDDKXXXRKKRRQRRRXMAVTALAARTWLGVWGVRTMQARGFLGSGAGKGGGGGGXIREAGGAFGKRXAAHEERYFREKEREQLASLREXXEEEIDXXKKEI

SEQ ID NO: 201 - protein, 103 aa, Artificial Sequence
  Designed; as detailed elsewhere in present application
  MISC_FEATURE (15)..(15): Xaa at this position is a single (one, 1) amino acid (or lack thereof) selected from the following options: Gly Pro or is absent (no amino acid at this position and so this position is not present)
  MISC_FEATURE (16)..(16): Tyr or is absent (no amino acid at this position and so this position is not present)
  MISC_FEATURE (17)..(17): Gly or is absent (no amino acid at this position and so this position is not present)
  MISC_FEATURE (27)..(27): Xaa at this position is a single (one, 1) amino acid (or lack thereof) selected from the following options: Gly Pro or is absent (no amino acid at this position and so this position is not present)
  MISC_FEATURE (57)..(57): Xaa at this position is a single (one, 1) amino acid selected from the following options: Ser Ala
  MISC_FEATURE (69)..(69): Xaa at this position is a single (one, 1) amino acid selected from the following options: Glu Gln Ala
  MISC_FEATURE (91)..(91): Xaa at this position is a single (one, 1) amino acid selected from the following options: His Tyr Ala
  MISC_FEATURE (92)..(92): Xaa at this position is a single (one, 1) amino acid selected from the following options: His Lys Ala
  MISC_FEATURE (98)..(98): Xaa at this position is a single (one, 1) amino acid selected from the following options: His Ala
  MISC_FEATURE (99)..(99): Xaa at this position is a single (one, 1) amino acid selected from the following options: His Ala
HHHHHHDYKDDDDKXXXRKKRRQRRRXMAVTALAARTWLGVWGVRTMQARGFGGGGXIREAGGAFGKRXAAHEERYFREKEREQLASLREXXEEEIDXXKKEI

SEQ ID NO: 202 - protein, 99 aa, Artificial Sequence
  Designed; as detailed elsewhere in present application
  MISC_FEATURE (15)..(15): Xaa at this position is a single (one, 1) amino acid (or lack thereof) selected from the following options: Gly Pro or is absent (no amino acid at this position and so this position is not present)
  MISC_FEATURE (16)..(16): Tyr or is absent (no amino acid at this position and so this position is not present)
  MISC_FEATURE (17)..(17): Gly or is absent (no amino acid at this position and so this position is not present)
  MISC_FEATURE (27)..(27): Xaa at this position is a single (one, 1) amino acid (or lack thereof) selected from the following options: Gly Pro or is absent (no amino acid at this position and so this position is not present)
  MISC_FEATURE (53)..(53): Xaa at this position is a single (one, 1) amino acid selected from the following options: Ser Ala
  MISC_FEATURE (65)..(65): Xaa at this position is a single (one, 1) amino acid selected from the following options: Glu Gln Ala
  MISC_FEATURE (87)..(87): Xaa at this position is a single (one, 1) amino acid selected from the following options: His Tyr Ala
  MISC_FEATURE (88)..(88): Xaa at this position is a single (one, 1) amino acid selected from the following options: His Lys Ala
  MISC_FEATURE (94)..(94): Xaa at this position is a single (one, 1) amino acid selected from the following options: His Ala
  MISC_FEATURE (95)..(95): Xaa at this position is a single (one, 1) amino acid selected from the following options: His Ala
HHHHHHDYKDDDDKXXXRKKRRQRRRXMAVTALAARTWLGVWGVRTMQARGFXIREAGGAFGKRXAAHEERYFREKEREQLASLREXXEEEIDXXKKEI

SEQ ID NO: 203 - protein, 87 aa, Artificial Sequence
  Designed; as detailed elsewhere in present application
  MISC_FEATURE (15)..(15): Xaa at this position is a single (one, 1) amino acid (or lack thereof) selected from the following options: Gly Pro or is absent (no amino acid at this position and so this position is not present)
  MISC_FEATURE (16)..(16): Tyr or is absent (no amino acid at this position and so this position is not present)
  MISC_FEATURE (17)..(17): Gly or is absent (no amino acid at this position and so this position is not present)
  MISC_FEATURE (27)..(27): Xaa at this position is a single (one, 1) amino acid (or lack thereof) selected from the following options: Gly Pro or is absent (no amino acid at this position and so this position is not present)
  MISC_FEATURE (54)..(54): Xaa at this position is a single (one, 1) amino acid selected from the following options: Ser Ala
  MISC_FEATURE (66)..(66): Xaa at this position is a single (one, 1) amino acid selected from the following options: Glu Gln Ala
HHHHHHDYKDDDDKXXXRKKRRQRRRXMAVTALAARTWLGVWGVRTMQARGFGXIREAGGAFGKRXAAHEERYFREKEREQLASLRE

SEQ ID NO: 204 - protein, 86 aa, Artificial Sequence
  Designed; as detailed elsewhere in present application
  MISC_FEATURE (15)..(15): Xaa at this position is a single (one, 1) amino acid (or lack thereof) selected from the following options: Gly Pro or is absent (no amino acid at this position and so this position is not present)
  MISC_FEATURE (16)..(16): Tyr or is absent (no amino acid at this position and so this position is not present)
  MISC_FEATURE (17)..(17): Gly or is absent (no amino acid at this position and so this position is not present)
  MISC_FEATURE (27)..(27): Xaa at this position is a single (one, 1) amino acid (or lack thereof) selected from the following options: Gly Pro or is absent (no amino acid at this position and so this position is not present)
  MISC_FEATURE (53)..(53): Xaa at this position is a single (one, 1) amino acid selected from the following options: Ser Ala
  MISC_FEATURE (65)..(65): Xaa at this position is a single (one, 1) amino acid selected from the following options: Glu Gln Ala
HHHHHHDYKDDDDKXXXRKKRRQRRRXMAVTALAARTWLGVWGVRTMQARGFXIREAGGAFGKRXAAHEERYFREKEREQLASLRE

SEQ ID NO: 205 - protein, 69 aa, Artificial Sequence
  Designed; as detailed elsewhere in present application
  MISC_FEATURE (15)..(15): Xaa at this position is a single (one, 1) amino acid (or lack thereof) selected from the following options: Gly Pro or is absent (no amino acid at this position and so this position is not present)
  MISC_FEATURE (16)..(16): Tyr or is absent (no amino acid at this position and so this position is not present)
  MISC_FEATURE (17)..(17): Gly or is absent (no amino acid at this position and so this position is not present)
  MISC_FEATURE (27)..(27): Xaa at this position is a single (one, 1) amino acid (or lack thereof) selected from the following options: Gly Pro or is absent (no amino acid at this position and so this position is not present)
HHHHHHDYKDDDDKXXXRKKRRQRRRXMAVTALAARTWLGVWGVRTMQARGFLASLREYHEEEIDHHKK

SEQ ID NO: 206 - protein, 136 aa, Artificial Sequence
  Designed; as detailed elsewhere in present application
  MISC_FEATURE (15)..(15): Xaa at this position is a single (one, 1) amino acid (or lack thereof) selected from the following options: Gly Pro or is absent (no amino acid at this position and so this position is not present)
  MISC_FEATURE (16)..(16): Tyr or is absent (no amino acid at this position and so this position is not present)
  MISC_FEATURE (17)..(17): Gly or is absent (no amino acid at this position and so this position is not present)
  MISC_FEATURE (27)..(27): Xaa at this position is a single (one, 1) amino acid (or lack thereof) selected from the following options: Gly Pro or is absent (no amino acid at this position and so this position is not present)
  MISC_FEATURE (66)..(66): Xaa at this position is a single (one, 1) amino acid selected from the following options: Ser Ala
  MISC_FEATURE (78)..(78): Xaa at this position is a single (one, 1) amino acid selected from the following options: Glu Gln Ala
  MISC_FEATURE (100)..(100): Xaa at this position is a single (one, 1) amino acid selected from the following options: His Tyr Ala
  MISC_FEATURE (101)..(101): Xaa at this position is a single (one, 1) amino acid selected from the following options: His Lys Ala
  MISC_FEATURE (107)..(107): Xaa at this position is a single (one, 1) amino acid selected from the following options: His Ala
  MISC_FEATURE (108)..(108): Xaa at this position is a single (one, 1) amino acid selected from the following options: His Ala
  MISC_FEATURE (135)..(135): Asp or is absent (no amino acid at this position and so this position is not present)
  MISC_FEATURE (136)..(136): Asp or is absent (no amino acid at this position and so this position is not present)
HHHHHHDYKDDDDKXXXRKKRRQRRRXMAVTALAARTWLGVWGVRTMQARGFLGSGAGKGGGGGGXIREAGGAFGKRXAAHEERYFRDKEREQLASLREXXEEEIDXXKKEIQRLQKEIDRHKNKIKKLKGDDDXX

SEQ ID NO: 207 - protein, 112 aa, Artificial Sequence
  Designed; as detailed elsewhere in present application
  MISC_FEATURE (15)..(15): Xaa at this position is a single (one, 1) amino acid (or lack thereof) selected from the following options: Gly Pro or is absent (no amino acid at this position and so this position is not present)
  MISC_FEATURE (16)..(16): Tyr or is absent (no amino acid at this position and so this position is not present)
  MISC_FEATURE (17)..(17): Gly or is absent (no amino acid at this position and so this position is not present)
  MISC_FEATURE (27)..(27): Xaa at this position is a single (one, 1) amino acid (or lack thereof) selected from the following options: Gly Pro or is absent (no amino acid at this position and so this position is not present)
  MISC_FEATURE (66)..(66): Xaa at this position is a single (one, 1) amino acid selected from the following options: Ser Ala
  MISC_FEATURE (78)..(78): Xaa at this position is a single (one, 1) amino acid selected from the following options: Glu Gln Ala
  MISC_FEATURE (100)..(100): Xaa at this position is a single (one, 1) amino acid selected from the following options: His Tyr Ala
  MISC_FEATURE (101)..(101): Xaa at this position is a single (one, 1) amino acid selected from the following options: His Lys Ala
  MISC_FEATURE (107)..(107): Xaa at this position is a single (one, 1) amino acid selected from the following options: His Ala
  MISC_FEATURE (108)..(108): Xaa at this position is a single (one, 1) amino acid selected from the following options: His Ala
HHHHHHDYKDDDDKXXXRKKRRQRRRXMAVTALAARTWLGVWGVRTMQARGFLGSGAGKGGGGGGXIREAGGAFGKRXAAHEERYFRDKEREQLASLREXXEEEIDXXKKEI

SEQ ID NO: 208 - protein, 103 aa, Artificial Sequence
  Designed; as detailed elsewhere in present application
  MISC_FEATURE (15)..(15): Xaa at this position is a single (one, 1) amino acid (or lack thereof) selected from the following options: Gly Pro or is absent (no amino acid at this position and so this position is not present)
  MISC_FEATURE (16)..(16): Tyr or is absent (no amino acid at this position and so this position is not present)
  MISC_FEATURE (17)..(17): Gly or is absent (no amino acid at this position and so this position is not present)
  MISC_FEATURE (27)..(27): Xaa at this position is a single (one, 1) amino acid (or lack thereof) selected from the following options: Gly Pro or is absent (no amino acid at this position and so this position is not present)
  MISC_FEATURE (57)..(57): Xaa at this position is a single (one, 1) amino acid selected from the following options: Ser Ala
  MISC_FEATURE (69)..(69): Xaa at this position is a single (one, 1) amino acid selected from the following options: Glu Gln Ala
  MISC_FEATURE (91)..(91): Xaa at this position is a single (one, 1) amino acid selected from the following options: His Tyr Ala
  MISC_FEATURE (92)..(92): Xaa at this position is a single (one, 1) amino acid selected from the following options: His Lys Ala
  MISC_FEATURE (98)..(98): Xaa at this position is a single (one, 1) amino acid selected from the following options: His Ala
  MISC_FEATURE (99)..(99): Xaa at this position is a single (one, 1) amino acid selected from the following options: His Ala
HHHHHHDYKDDDDKXXXRKKRRQRRRXMAVTALAARTWLGVWGVRTMQARGFGGGGXIREAGGAFGKRXAAHEERYFRDKEREQLASLREXXEEEIDXXKKEI

SEQ ID NO: 209 - protein, 99 aa, Artificial Sequence
  Designed; as detailed elsewhere in present application
  MISC_FEATURE (15)..(15): Xaa at this position is a single (one, 1) amino acid (or lack thereof) selected from the following options: Gly Pro or is absent (no amino acid at this position and so this position is not present)
  MISC_FEATURE (16)..(16): Tyr or is absent (no amino acid at this position and so this position is not present)
  MISC_FEATURE (17)..(17): Gly or is absent (no amino acid at this position and so this position is not present)
  MISC_FEATURE (27)..(27): Xaa at this position is a single (one, 1) amino acid (or lack thereof) selected from the following options: Gly Pro or is absent (no amino acid at this position and so this position is not present)
  MISC_FEATURE (53)..(53): Xaa at this position is a single (one, 1) amino acid selected from the following options: Ser Ala
  MISC_FEATURE (65)..(65): Xaa at this position is a single (one, 1) amino acid selected from the following options: Glu Gln Ala
  MISC_FEATURE (87)..(87): Xaa at this position is a single (one, 1) amino acid selected from the following options: His Tyr Ala
  MISC_FEATURE (88)..(88): Xaa at this position is a single (one, 1) amino acid selected from the following options: His Lys Ala
  MISC_FEATURE (94)..(94): Xaa at this position is a single (one, 1) amino acid selected from the following options: His Ala
  MISC_FEATURE (95)..(95): Xaa at this position is a single (one, 1) amino acid selected from the following options: His Ala
HHHHHHDYKDDDDKXXXRKKRRQRRRXMAVTALAARTWLGVWGVRTMQARGFXIREAGGAFGKRXAAHEERYFRDKEREQLASLREXXEEEIDXXKKEI

SEQ ID NO: 210 - protein, 87 aa, Artificial Sequence
  Designed; as detailed elsewhere in present application
  MISC_FEATURE (15)..(15): Xaa at this position is a single (one, 1) amino acid (or lack thereof) selected from the following options: Gly Pro or is absent (no amino acid at this position and so this position is not present)
  MISC_FEATURE (16)..(16): Tyr or is absent (no amino acid at this position and so this position is not present)
  MISC_FEATURE (17)..(17): Gly or is absent (no amino acid at this position and so this position is not present)
  MISC_FEATURE (27)..(27): Xaa at this position is a single (one, 1) amino acid (or lack thereof) selected from the following options: Gly Pro or is absent (no amino acid at this position and so this position is not present)
  MISC_FEATURE (54)..(54): Xaa at this position is a single (one, 1) amino acid selected from the following options: Ser Ala
  MISC_FEATURE (66)..(66): Xaa at this position is a single (one, 1) amino acid selected from the following options: Glu Gln Ala
HHHHHHDYKDDDDKXXXRKKRRQRRRXMAVTALAARTWLGVWGVRTMQARGFGXIREAGGAFGKRXAAHEERYFRDKEREQLASLRE

SEQ ID NO: 211 - protein, 86 aa, Artificial Sequence
  Designed; as detailed elsewhere in present application
  MISC_FEATURE (15)..(15): Xaa at this position is a single (one, 1) amino acid (or lack thereof) selected from the following options: Gly Pro or is absent (no amino acid at this position and so this position is not present)
  MISC_FEATURE (16)..(16): Tyr or is absent (no amino acid at this position and so this position is not present)
  MISC_FEATURE (17)..(17): Gly or is absent (no amino acid at this position and so this position is not present)
  MISC_FEATURE (27)..(27): Xaa at this position is a single (one, 1) amino acid (or lack thereof) selected from the following options: Gly Pro or is absent (no amino acid at this position and so this position is not present)
  MISC_FEATURE (53)..(53): Xaa at this position is a single (one, 1) amino acid selected from the following options: Ser Ala
  MISC_FEATURE (65)..(65): Xaa at this position is a single (one, 1) amino acid selected from the following options: Glu Gln Ala
HHHHHHDYKDDDDKXXXRKKRRQRRRXMAVTALAARTWLGVWGVRTMQARGFXIREAGGAFGKRXAAHEERYFRDKEREQLASLRE

SEQ ID NO: 212 - protein, 69 aa, Artificial Sequence
  Designed; as detailed elsewhere in present application
  MISC_FEATURE (15)..(15): Xaa at this position is a single (one, 1) amino acid (or lack thereof) selected from the following options: Gly Pro or is absent (no amino acid at this position and so this position is not present)
  MISC_FEATURE (16)..(16): Tyr or is absent (no amino acid at this position and so this position is not present)
  MISC_FEATURE (17)..(17): Gly or is absent (no amino acid at this position and so this position is not present)
  MISC_FEATURE (27)..(27): Xaa at this position is a single (one, 1) amino acid (or lack thereof) selected from the following options: Gly Pro or is absent (no amino acid at this position and so this position is not present)
HHHHHHDYKDDDDKXXXRKKRRQRRRXMAVTALAARTWLGVWGVRTMQARGFLASLREHHEEEIDHHKK

SEQ ID NO: 213 - protein, 136 aa, Artificial Sequence
  Designed; as detailed elsewhere in present application
  MISC_FEATURE (15)..(15): Xaa at this position is a single (one, 1) amino acid (or lack thereof) selected from the following options: Gly Pro or is absent (no amino acid at this position and so this position is not present)
  MISC_FEATURE (16)..(16): Tyr or is absent (no amino acid at this position and so this position is not present)
  MISC_FEATURE (17)..(17): Gly or is absent (no amino acid at this position and so this position is not present)
  MISC_FEATURE (27)..(27): Xaa at this position is a single (one, 1) amino acid (or lack thereof) selected from the following options: Gly Pro or is absent (no amino acid at this position and so this position is not present)
  MISC_FEATURE (66)..(66): Xaa at this position is a single (one, 1) amino acid selected from the following options: Ser Ala
  MISC_FEATURE (78)..(78): Xaa at this position is a single (one, 1) amino acid selected from the following options: Glu Gln Ala
  MISC_FEATURE (100)..(100): Xaa at this position is a single (one, 1) amino acid selected from the following options: His Tyr Ala
  MISC_FEATURE (101)..(101): Xaa at this position is a single (one, 1) amino acid selected from the following options: His Lys Ala
  MISC_FEATURE (107)..(107): Xaa at this position is a single (one, 1) amino acid selected from the following options: His Ala
  MISC_FEATURE (108)..(108): Xaa at this position is a single (one, 1) amino acid selected from the following options: His Ala
  MISC_FEATURE (128)..(128): Xaa at this position is a single (one, 1) amino acid selected from the following options: Met Gln Lys
  MISC_FEATURE (134)..(134): Asp or is absent (no amino acid at this position and so this position is not present)
  MISC_FEATURE (135)..(135): Asp or is absent (no amino acid at this position and so this position is not present)
  MISC_FEATURE (136)..(136): Asp or is absent (no amino acid at this position and so this position is not present)
HHHHHHDYKDDDDKXXXRKKRRQRRRXMAVTALAARTWLGVWGVRTMQARGFGFSSDKDHESSSGXIRDAGGAFGKRXQAEEERFFRQKTKEQLEALKKXXEDEIYXXKKAIEHMEKEIERHKQKIKXLKHDDXXX

SEQ ID NO: 214 - protein, 112 aa, Artificial Sequence
  Designed; as detailed elsewhere in present application
  MISC_FEATURE (15)..(15): Xaa at this position is a single (one, 1) amino acid (or lack thereof) selected from the following options: Gly Pro or is absent (no amino acid at this position and so this position is not present)
  MISC_FEATURE (16)..(16): Tyr or is absent (no amino acid at this position and so this position is not present)
  MISC_FEATURE (17)..(17): Gly or is absent (no amino acid at this position and so this position is not present)
  MISC_FEATURE (27)..(27): Xaa at this position is a single (one, 1) amino acid (or lack thereof) selected from the following options: Gly Pro or is absent (no amino acid at this position and so this position is not present)
  MISC_FEATURE (66)..(66): Xaa at this position is a single (one, 1) amino acid selected from the following options: Ser Ala
  MISC_FEATURE (78)..(78): Xaa at this position is a single (one, 1) amino acid selected from the following options: Glu Gln Ala
  MISC_FEATURE (100)..(100): Xaa at this position is a single (one, 1) amino acid selected from the following options: His Tyr Ala
  MISC_FEATURE (101)..(101): Xaa at this position is a single (one, 1) amino acid selected from the following options: His Lys Ala
  MISC_FEATURE (107)..(107): Xaa at this position is a single (one, 1) amino acid selected from the following options: His Ala
  MISC_FEATURE (108)..(108): Xaa at this position is a single (one, 1) amino acid selected from the following options: His Ala
HHHHHHDYKDDDDKXXXRKKRRQRRRXMAVTALAARTWLGVWGVRTMQARGFGFSSDKDHESSSGXIRDAGGAFGKRXQAEEERFFRQKTKEQLEALKKXXEDEIYXXKKAI

SEQ ID NO: 215 - protein, 103 aa, Artificial Sequence
  Designed; as detailed elsewhere in present application
  MISC_FEATURE (15)..(15): Xaa at this position is a single (one, 1) amino acid (or lack thereof) selected from the following options: Gly Pro or is absent (no amino acid at this position and so this position is not present)
  MISC_FEATURE (16)..(16): Tyr or is absent (no amino acid at this position and so this position is not present)
  MISC_FEATURE (17)..(17): Gly or is absent (no amino acid at this position and so this position is not present)
  MISC_FEATURE (27)..(27): Xaa at this position is a single (one, 1) amino acid (or lack thereof) selected from the following options: Gly Pro or is absent (no amino acid at this position and so this position is not present)
  MISC_FEATURE (57)..(57): Xaa at this position is a single (one, 1) amino acid selected from the following options: Ser Ala
  MISC_FEATURE (69)..(69): Xaa at this position is a single (one, 1) amino acid selected from the following options: Glu Gln Ala
  MISC_FEATURE (91)..(91): Xaa at this position is a single (one, 1) amino acid selected from the following options: His Tyr Ala
  MISC_FEATURE (92)..(92): Xaa at this position is a single (one, 1) amino acid selected from the following options: His Lys Ala
  MISC_FEATURE (98)..(98): Xaa at this position is a single (one, 1) amino acid selected from the following options: His Ala
  MISC_FEATURE (99)..(99): Xaa at this position is a single (one, 1) amino acid selected from the following options: His Ala
HHHHHHDYKDDDDKXXXRKKRRQRRRXMAVTALAARTWLGVWGVRTMQARGFSSSGXIRDAGGAFGKRXQAEEERFFRQKTKEQLEALKKXXEDEIYXXKKAI

SEQ ID NO: 216 - protein, 99 aa, Artificial Sequence
  Designed; as detailed elsewhere in present application
  MISC_FEATURE (15)..(15): Xaa at this position is a single (one, 1) amino acid (or lack thereof) selected from the following options: Gly Pro or is absent (no amino acid at this position and so this position is not present)
  MISC_FEATURE (16)..(16): Tyr or is absent (no amino acid at this position and so this position is not present)
  MISC_FEATURE (17)..(17): Gly or is absent (no amino acid at this position and so this position is not present)
  MISC_FEATURE (27)..(27): Xaa at this position is a single (one, 1) amino acid (or lack thereof) selected from the following options: Gly Pro or is absent (no amino acid at this position and so this position is not present)
  MISC_FEATURE (53)..(53): Xaa at this position is a single (one, 1) amino acid selected from the following options: Ser Ala
  MISC_FEATURE (65)..(65): Xaa at this position is a single (one, 1) amino acid selected from the following options: Glu Gln Ala
  MISC_FEATURE (87)..(87): Xaa at this position is a single (one, 1) amino acid selected from the following options: His Tyr Ala
  MISC_FEATURE (88)..(88): Xaa at this position is a single (one, 1) amino acid selected from the following options: His Lys Ala
  MISC_FEATURE (94)..(94): Xaa at this position is a single (one, 1) amino acid selected from the following options: His Ala
  MISC_FEATURE (95)..(95): Xaa at this position is a single (one, 1) amino acid selected from the following options: His Ala
HHHHHHDYKDDDDKXXXRKKRRQRRRXMAVTALAARTWLGVWGVRTMQARGFXIRDAGGAFGKRXQAEEERFFRQKTKEQLEALKKXXEDEIYXXKKAI

SEQ ID NO: 217 - protein, 87 aa, Artificial Sequence
  Designed; as detailed elsewhere in present application
  MISC_FEATURE (15)..(15): Xaa at this position is a single (one, 1) amino acid (or lack thereof) selected from the following options: Gly Pro or is absent (no amino acid at this position and so this position is not present)
  MISC_FEATURE (16)..(16): Tyr or is absent (no amino acid at this position and so this position is not present)
  MISC_FEATURE (17)..(17): Gly or is absent (no amino acid at this position and so this position is not present)
  MISC_FEATURE (27)..(27): Xaa at this position is a single (one, 1) amino acid (or lack thereof) selected from the following options: Gly Pro or is absent (no amino acid at this position and so this position is not present)
  MISC_FEATURE (54)..(54): Xaa at this position is a single (one, 1) amino acid selected from the following options: Ser Ala
  MISC_FEATURE (66)..(66): Xaa at this position is a single (one, 1) amino acid selected from the following options: Glu Gln Ala
HHHHHHDYKDDDDKXXXRKKRRQRRRXMAVTALAARTWLGVWGVRTMQARGFGXIRDAGGAFGKRXQAEEERFFRQKTKEQLEALKK

SEQ ID NO: 218 - protein, 86 aa, Artificial Sequence
  Designed; as detailed elsewhere in present application
  MISC_FEATURE (15)..(15): Xaa at this position is a single (one, 1) amino acid (or lack thereof) selected from the following options: Gly Pro or is absent (no amino acid at this position and so this position is not present)
  MISC_FEATURE (16)..(16): Tyr or is absent (no amino acid at this position and so this position is not present)
  MISC_FEATURE (17)..(17): Gly or is absent (no amino acid at this position and so this position is not present)
  MISC_FEATURE (27)..(27): Xaa at this position is a single (one, 1) amino acid (or lack thereof) selected from the following options: Gly Pro or is absent (no amino acid at this position and so this position is not present)
  MISC_FEATURE (53)..(53): Xaa at this position is a single (one, 1) amino acid selected from the following options: Ser Ala
  MISC_FEATURE (65)..(65): Xaa at this position is a single (one, 1) amino acid selected from the following options: Glu Gln Ala
HHHHHHDYKDDDDKXXXRKKRRQRRRXMAVTALAARTWLGVWGVRTMQARGFXIRDAGGAFGKRXQAEEERFFRQKTKEQLEALKK

SEQ ID NO: 219 - protein, 69 aa, Artificial Sequence
  Designed; as detailed elsewhere in present application
  MISC_FEATURE (15)..(15): Xaa at this position is a single (one, 1) amino acid (or lack thereof) selected from the following options: Gly Pro or is absent (no amino acid at this position and so this position is not present)
  MISC_FEATURE (16)..(16): Tyr or is absent (no amino acid at this position and so this position is not present)
  MISC_FEATURE (17)..(17): Gly or is absent (no amino acid at this position and so this position is not present)
  MISC_FEATURE (27)..(27): Xaa at this position is a single (one, 1) amino acid (or lack thereof) selected from the following options: Gly Pro or is absent (no amino acid at this position and so this position is not present)
HHHHHHDYKDDDDKXXXRKKRRQRRRXMAVTALAARTWLGVWGVRTMQARGFLEALKKHHEDEIYHHKK

SEQ ID NO: 220 - protein, 136 aa, Artificial Sequence
  Designed; as detailed elsewhere in present application
  MISC_FEATURE (15)..(15): Xaa at this position is a single (one, 1) amino acid (or lack thereof) selected from the following options: Gly Pro or is absent (no amino acid at this position and so this position is not present)
  MISC_FEATURE (16)..(16): Tyr or is absent (no amino acid at this position and so this position is not present)
  MISC_FEATURE (17)..(17): Gly or is absent (no amino acid at this position and so this position is not present)
  MISC_FEATURE (27)..(27): Xaa at this position is a single (one, 1) amino acid (or lack thereof) selected from the following options: Gly Pro or is absent (no amino acid at this position and so this position is not present)
  MISC_FEATURE (78)..(78): Xaa at this position is a single (one, 1) amino acid selected from the following options: Glu Gln Ala
  MISC_FEATURE (100)..(100): Xaa at this position is a single (one, 1) amino acid selected from the following options: His Tyr Ala
  MISC_FEATURE (101)..(101): Xaa at this position is a single (one, 1) amino acid selected from the following options: His Lys Ala
  MISC_FEATURE (107)..(107): Xaa at this position is a single (one, 1) amino acid selected from the following options: His Ala
  MISC_FEATURE (108)..(108): Xaa at this position is a single (one, 1) amino acid selected from the following options: His Ala Thr Ser
  MISC_FEATURE (134)..(134): Asp or is absent (no amino acid at this position and so this position is not present)
  MISC_FEATURE (135)..(135): Asp or is absent (no amino acid at this position and so this position is not present)
  MISC_FEATURE (136)..(136): Asp or is absent (no amino acid at this position and so this position is not present)
HHHHHHDYKDDDDKXXXRKKRRQRRRXMAVTALAARTWLGVWGVRTMQARGFSSDQPHDLDRGAGAIREAGGAFAKRXAAEEERYFRAQAKEQLAALKKXXEEEITXXKKEIERLQNEIERHKQKIKKLKHDDXXX

SEQ ID NO: 221 - protein, 112 aa, Artificial Sequence
  Designed; as detailed elsewhere in present application
  MISC_FEATURE (15)..(15): Xaa at this position is a single (one, 1) amino acid (or lack thereof) selected from the following options: Gly Pro or is absent (no amino acid at this position and so this position is not present)
  MISC_FEATURE (16)..(16): Tyr or is absent (no amino acid at this position and so this position is not present)
  MISC_FEATURE (17)..(17): Gly or is absent (no amino acid at this position and so this position is not present)
  MISC_FEATURE (27)..(27): Xaa at this position is a single (one, 1) amino acid (or lack thereof) selected from the following options: Gly Pro or is absent (no amino acid at this position and so this position is not present)
  MISC_FEATURE (78)..(78): Xaa at this position is a single (one, 1) amino acid selected from the following options: Glu Gln Ala
  MISC_FEATURE (100)..(100): Xaa at this position is a single (one, 1) amino acid selected from the following options: His Tyr Ala
  MISC_FEATURE (101)..(101): Xaa at this position is a single (one, 1) amino acid selected from the following options: His Lys Ala
  MISC_FEATURE (107)..(107): Xaa at this position is a single (one, 1) amino acid selected from the following options: His Ala
  MISC_FEATURE (108)..(108): Xaa at this position is a single (one, 1) amino acid selected from the following options: His Ala Thr Ser
HHHHHHDYKDDDDKXXXRKKRRQRRRXMAVTALAARTWLGVWGVRTMQARGFSSDQPHDLDRGAGAIREAGGAFAKRXAAEEERYFRAQAKEQLAALKKXXEEEITXXKKEI

SEQ ID NO: 222 - protein, 103 aa, Artificial Sequence
  Designed; as detailed elsewhere in present application
  MISC_FEATURE (15)..(15): Xaa at this position is a single (one, 1) amino acid (or lack thereof) selected from the following options: Gly Pro or is absent (no amino acid at this position and so this position is not present)
  MISC_FEATURE (16)..(16): Tyr or is absent (no amino acid at this position and so this position is not present)
  MISC_FEATURE (17)..(17): Gly or is absent (no amino acid at this position and so this position is not present)
  MISC_FEATURE (27)..(27): Xaa at this position is a single (one, 1) amino acid (or lack thereof) selected from the following options: Gly Pro or is absent (no amino acid at this position and so this position is not present)
  MISC_FEATURE (69)..(69): Xaa at this position is a single (one, 1) amino acid selected from the following options: Glu Gln Ala
  MISC_FEATURE (91)..(91): Xaa at this position is a single (one, 1) amino acid selected from the following options: His Tyr Ala
  MISC_FEATURE (92)..(92): Xaa at this position is a single (one, 1) amino acid selected from the following options: His Lys Ala
  MISC_FEATURE (98)..(98): Xaa at this position is a single (one, 1) amino acid selected from the following options: His Ala
  MISC_FEATURE (99)..(99): Xaa at this position is a single (one, 1) amino acid selected from the following options: His Ala Thr Ser
HHHHHHDYKDDDDKXXXRKKRRQRRRXMAVTALAARTWLGVWGVRTMQARGFRGAGAIREAGGAFAKRXAAEEERYFRAQAKEQLAALKKXXEEEITXXKKEI

SEQ ID NO: 223 - protein, 99 aa, Artificial Sequence
  Designed; as detailed elsewhere in present application
  MISC_FEATURE (15)..(15): Xaa at this position is a single (one, 1) amino acid (or lack thereof) selected from the following options: Gly Pro or is absent (no amino acid at this position and so this position is not present)
  MISC_FEATURE (16)..(16): Tyr or is absent (no amino acid at this position and so this position is not present)
  MISC_FEATURE (17)..(17): Gly or is absent (no amino acid at this position and so this position is not present)
  MISC_FEATURE (27)..(27): Xaa at this position is a single (one, 1) amino acid (or lack thereof) selected from the following options: Gly Pro or is absent (no amino acid at this position and so this position is not present)
  MISC_FEATURE (65)..(65): Xaa at this position is a single (one, 1) amino acid selected from the following options: Glu Gln Ala
  MISC_FEATURE (87)..(87): Xaa at this position is a single (one, 1) amino acid selected from the following options: His Tyr Ala
  MISC_FEATURE (88)..(88): Xaa at this position is a single (one, 1) amino acid selected from the following options: His Lys Ala
  MISC_FEATURE (94)..(94): Xaa at this position is a single (one, 1) amino acid selected from the following options: His Ala
  MISC_FEATURE (95)..(95): Xaa at this position is a single (one, 1) amino acid selected from the following options: His Ala Thr Ser
HHHHHHDYKDDDDKXXXRKKRRQRRRXMAVTALAARTWLGVWGVRTMQARGFAIREAGGAFAKRXAAEEERYFRAQAKEQLAALKKXXEEEITXXKKEI

SEQ ID NO: 224 - protein, 87 aa, Artificial Sequence
  Designed; as detailed elsewhere in present application
  MISC_FEATURE (15)..(15): Xaa at this position is a single (one, 1) amino acid (or lack thereof) selected from the following options: Gly Pro or is absent (no amino acid at this position and so this position is not present)
  MISC_FEATURE (16)..(16): Tyr or is absent (no amino acid at this position and so this position is not present)
  MISC_FEATURE (17)..(17): Gly or is absent (no amino acid at this position and so this position is not present)
  MISC_FEATURE (27)..(27): Xaa at this position is a single (one, 1) amino acid (or lack thereof) selected from the following options: Gly Pro or is absent (no amino acid at this position and so this position is not present)
  MISC_FEATURE (66)..(66): Xaa at this position is a single (one, 1) amino acid selected from the following options: Glu Gln Ala
HHHHHHDYKDDDDKXXXRKKRRQRRRXMAVTALAARTWLGVWGVRTMQARGFGAIREAGGAFAKRXAAEEERYFRAQAKEQLAALKK

SEQ ID NO: 225 - protein, 86 aa, Artificial Sequence
  Designed; as detailed elsewhere in present application
  MISC_FEATURE (15)..(15): Xaa at this position is a single (one, 1) amino acid (or lack thereof) selected from the following options: Gly Pro or is absent (no amino acid at this position and so this position is not present)
  MISC_FEATURE (16)..(16): Tyr or is absent (no amino acid at this position and so this position is not present)
  MISC_FEATURE (17)..(17): Gly or is absent (no amino acid at this position and so this position is not present)
  MISC_FEATURE (27)..(27): Xaa at this position is a single (one, 1) amino acid (or lack thereof) selected from the following options: Gly Pro or is absent (no amino acid at this position and so this position is not present)
  MISC_FEATURE (65)..(65): Xaa at this position is a single (one, 1) amino acid selected from the following options: Glu Gln Ala
HHHHHHDYKDDDDKXXXRKKRRQRRRXMAVTALAARTWLGVWGVRTMQARGFAIREAGGAFAKRXAAEEERYFRAQAKEQLAALKK

SEQ ID NO: 226 - protein, 69 aa, Artificial Sequence
  Designed; as detailed elsewhere in present application
  MISC_FEATURE (15)..(15): Xaa at this position is a single (one, 1) amino acid (or lack thereof) selected from the following options: Gly Pro or is absent (no amino acid at this position and so this position is not present)
  MISC_FEATURE (16)..(16): Tyr or is absent (no amino acid at this position and so this position is not present)
  MISC_FEATURE (17)..(17): Gly or is absent (no amino acid at this position and so this position is not present)
  MISC_FEATURE (27)..(27): Xaa at this position is a single (one, 1) amino acid (or lack thereof) selected from the following options: Gly Pro or is absent (no amino acid at this position and so this position is not present)
HHHHHHDYKDDDDKXXXRKKRRQRRRXMAVTALAARTWLGVWGVRTMQARGFLAALKKYHEEEITHTKK

SEQ ID NO: 227 - protein, 136 aa, Artificial Sequence
  Designed; as detailed elsewhere in present application
  MISC_FEATURE (15)..(15): Xaa at this position is a single (one, 1) amino acid (or lack thereof) selected from the following options: Gly Pro or is absent (no amino acid at this position and so this position is not present)
  MISC_FEATURE (16)..(16): Tyr or is absent (no amino acid at this position and so this position is not present)
  MISC_FEATURE (17)..(17): Gly or is absent (no amino acid at this position and so this position is not present)
  MISC_FEATURE (27)..(27): Xaa at this position is a single (one, 1) amino acid (or lack thereof) selected from the following options: Gly Pro or is absent (no amino acid at this position and so this position is not present)
  MISC_FEATURE (66)..(66): Xaa at this position is a single (one, 1) amino acid selected from the following options: Ser Ala
  MISC_FEATURE (78)..(78): Xaa at this position is a single (one, 1) amino acid selected from the following options: Glu Gln Ala
  MISC_FEATURE (100)..(100): Xaa at this position is a single (one, 1) amino acid selected from the following options: His Tyr Ala
  MISC_FEATURE (101)..(101): Xaa at this position is a single (one, 1) amino acid selected from the following options: His Lys Ala
  MISC_FEATURE (107)..(107): Xaa at this position is a single (one, 1) amino acid selected from the following options: His Ala
  MISC_FEATURE (108)..(108): Xaa at this position is a single (one, 1) amino acid selected from the following options: His Ala Thr Ser
  MISC_FEATURE (134)..(134): Asp or is absent (no amino acid at this position and so this position is not present)
  MISC_FEATURE (135)..(135): Asp or is absent (no amino acid at this position and so this position is not present)
  MISC_FEATURE (136)..(136): Asp or is absent (no amino acid at this position and so this position is not present)
HHHHHHDYKDDDDKXXXRKKRRQRRRXMAVTALAARTWLGVWGVRTMQARGFSSDQSEDLDRRAGXIREAGGAFAKRXAAEEERYFRAQAKEQLAALKKXXEEEIVXXKKEIERLQKEIERHKQKIKKLKHDDXXX

SEQ ID NO: 228 - protein, 112 aa, Artificial Sequence
  Designed; as detailed elsewhere in present application
  MISC_FEATURE (15)..(15): Xaa at this position is a single (one, 1) amino acid (or lack thereof) selected from the following options: Gly Pro or is absent (no amino acid at this position and so this position is not present)
  MISC_FEATURE (16)..(16): Tyr or is absent (no amino acid at this position and so this position is not present)
  MISC_FEATURE (17)..(17): Gly or is absent (no amino acid at this position and so this position is not present)
  MISC_FEATURE (27)..(27): Xaa at this position is a single (one, 1) amino acid (or lack thereof) selected from the following options: Gly Pro or is absent (no amino acid at this position and so this position is not present)
  MISC_FEATURE (66)..(66): Xaa at this position is a single (one, 1) amino acid selected from the following options: Ser Ala
  MISC_FEATURE (78)..(78): Xaa at this position is a single (one, 1) amino acid selected from the following options: Glu Gln Ala
  MISC_FEATURE (100)..(100): Xaa at this position is a single (one, 1) amino acid selected from the following options: His Tyr Ala
  MISC_FEATURE (101)..(101): Xaa at this position is a single (one, 1) amino acid selected from the following options: His Lys Ala
  MISC_FEATURE (107)..(107): Xaa at this position is a single (one, 1) amino acid selected from the following options: His Ala
  MISC_FEATURE (108)..(108): Xaa at this position is a single (one, 1) amino acid selected from the following options: His Ala Thr Ser
HHHHHHDYKDDDDKXXXRKKRRQRRRXMAVTALAARTWLGVWGVRTMQARGFSSDQSEDLDRRAGXIREAGGAFAKRXAAEEERYFRAQAKEQLAALKKXXEEEIVXXKKEI

SEQ ID NO: 229 - protein, 103 aa, Artificial Sequence
  Designed; as detailed elsewhere in present application
  MISC_FEATURE (15)..(15): Xaa at this position is a single (one, 1) amino acid (or lack thereof) selected from the following options: Gly Pro or is absent (no amino acid at this position and so this position is not present)
  MISC_FEATURE (16)..(16): Tyr or is absent (no amino acid at this position and so this position is not present)
  MISC_FEATURE (17)..(17): Gly or is absent (no amino acid at this position and so this position is not present)
  MISC_FEATURE (27)..(27): Xaa at this position is a single (one, 1) amino acid (or lack thereof) selected from the following options: Gly Pro or is absent (no amino acid at this position and so this position is not present)
  MISC_FEATURE (57)..(57): Xaa at this position is a single (one, 1) amino acid selected from the following options: Ser Ala
  MISC_FEATURE (69)..(69): Xaa at this position is a single (one, 1) amino acid selected from the following options: Glu Gln Ala
  MISC_FEATURE (91)..(91): Xaa at this position is a single (one, 1) amino acid selected from the following options: His Tyr Ala
  MISC_FEATURE (92)..(92): Xaa at this position is a single (one, 1) amino acid selected from the following options: His Lys Ala
  MISC_FEATURE (98)..(98): Xaa at this position is a single (one, 1) amino acid selected from the following options: His Ala
  MISC_FEATURE (99)..(99): Xaa at this position is a single (one, 1) amino acid selected from the following options: His Ala Thr Ser
HHHHHHDYKDDDDKXXXRKKRRQRRRXMAVTALAARTWLGVWGVRTMQARGFRRAGXIREAGGAFAKRXAAEEERYFRAQAKEQLAALKKXXEEEIVXXKKEI

SEQ ID NO: 230 - protein, 99 aa, Artificial Sequence
  Designed; as detailed elsewhere in present application
  MISC_FEATURE (15)..(15): Xaa at this position is a single (one, 1) amino acid (or lack thereof) selected from the following options: Gly Pro or is absent (no amino acid at this position and so this position is not present)
  MISC_FEATURE (16)..(16): Tyr or is absent (no amino acid at this position and so this position is not present)
  MISC_FEATURE (17)..(17): Gly or is absent (no amino acid at this position and so this position is not present)
  MISC_FEATURE (27)..(27): Xaa at this position is a single (one, 1) amino acid (or lack thereof) selected from the following options: Gly Pro or is absent (no amino acid at this position and so this position is not present)
  MISC_FEATURE (53)..(53): Xaa at this position is a single (one, 1) amino acid selected from the following options: Ser Ala
  MISC_FEATURE (65)..(65): Xaa at this position is a single (one, 1) amino acid selected from the following options: Glu Gln Ala
  MISC_FEATURE (87)..(87): Xaa at this position is a single (one, 1) amino acid selected from the following options: His Tyr Ala
  MISC_FEATURE (88)..(88): Xaa at this position is a single (one, 1) amino acid selected from the following options: His Lys Ala
  MISC_FEATURE (94)..(94): Xaa at this position is a single (one, 1) amino acid selected from the following options: His Ala
  MISC_FEATURE (95)..(95): Xaa at this position is a single (one, 1) amino acid selected from the following options: His Ala Thr Ser
HHHHHHDYKDDDDKXXXRKKRRQRRRXMAVTALAARTWLGVWGVRTMQARGFXIREAGGAFAKRXAAEEERYFRAQAKEQLAALKKXXEEEIVXXKKEI

SEQ ID NO: 231 - protein, 87 aa, Artificial Sequence
  Designed; as detailed elsewhere in present application
  MISC_FEATURE (15)..(15): Xaa at this position is a single (one, 1) amino acid (or lack thereof) selected from the following options: Gly Pro or is absent (no amino acid at this position and so this position is not present)
  MISC_FEATURE (16)..(16): Tyr or is absent (no amino acid at this position and so this position is not present)
  MISC_FEATURE (17)..(17): Gly or is absent (no amino acid at this position and so this position is not present)
  MISC_FEATURE (27)..(27): Xaa at this position is a single (one, 1) amino acid (or lack thereof) selected from the following options: Gly Pro or is absent (no amino acid at this position and so this position is not present)
  MISC_FEATURE (54)..(54): Xaa at this position is a single (one, 1) amino acid selected from the following options: Ser Ala
  MISC_FEATURE (66)..(66): Xaa at this position is a single (one, 1) amino acid selected from the following options: Glu Gln Ala
HHHHHHDYKDDDDKXXXRKKRRQRRRXMAVTALAARTWLGVWGVRTMQARGFGXIREAGGAFAKRXAAEEERYFRAQAKEQLAALKK

SEQ ID NO: 232 - protein, 86 aa, Artificial Sequence
  Designed; as detailed elsewhere in present application
  MISC_FEATURE (15)..(15): Xaa at this position is a single (one, 1) amino acid (or lack thereof) selected from the following options: Gly Pro or is absent (no amino acid at this position and so this position is not present)
  MISC_FEATURE (16)..(16): Tyr or is absent (no amino acid at this position and so this position is not present)
  MISC_FEATURE (17)..(17): Gly or is absent (no amino acid at this position and so this position is not present)
  MISC_FEATURE (27)..(27): Xaa at this position is a single (one, 1) amino acid (or lack thereof) selected from the following options: Gly Pro or is absent (no amino acid at this position and so this position is not present)
  MISC_FEATURE (53)..(53): Xaa at this position is a single (one, 1) amino acid selected from the following options: Ser Ala
  MISC_FEATURE (65)..(65): Xaa at this position is a single (one, 1) amino acid selected from the following options: Glu Gln Ala
HHHHHHDYKDDDDKXXXRKKRRQRRRXMAVTALAARTWLGVWGVRTMQARGFXIREAGGAFAKRXAAEEERYFRAQAKEQLAALKK

SEQ ID NO: 233 - protein, 69 aa, Artificial Sequence
  Designed; as detailed elsewhere in present application
  MISC_FEATURE (15)..(15): Xaa at this position is a single (one, 1) amino acid (or lack thereof) selected from the following options: Gly Pro or is absent (no amino acid at this position and so this position is not present)
  MISC_FEATURE (16)..(16): Tyr or is absent (no amino acid at this position and so this position is not present)
  MISC_FEATURE (17)..(17): Gly or is absent (no amino acid at this position and so this position is not present)
  MISC_FEATURE (27)..(27): Xaa at this position is a single (one, 1) amino acid (or lack thereof) selected from the following options: Gly Pro or is absent (no amino acid at this position and so this position is not present)
HHHHHHDYKDDDDKXXXRKKRRQRRRXMAVTALAARTWLGVWGVRTMQARGFLAALKKYHEEEIVHSKK

SEQ ID NO: 234 - protein, 132 aa, Artificial Sequence
  Designed; as detailed elsewhere in present application
  MISC_FEATURE (15)..(15): Xaa at this position is a single (one, 1) amino acid (or lack thereof) selected from the following options: Gly Pro or is absent (no amino acid at this position and so this position is not present)
  MISC_FEATURE (23)..(23): Xaa at this position is a single (one, 1) amino acid (or lack thereof) selected from the following options: Gly Pro or is absent (no amino acid at this position and so this position is not present)
  MISC_FEATURE (74)..(74): Xaa at this position is a single (one, 1) amino acid selected from the following options: Glu Gln Ala
  MISC_FEATURE (96)..(96): Xaa at this position is a single (one, 1) amino acid selected from the following options: His Tyr Ala
  MISC_FEATURE (97)..(97): Xaa at this position is a single (one, 1) amino acid selected from the following options: His Lys Ala
  MISC_FEATURE (103)..(103): Xaa at this position is a single (one, 1) amino acid selected from the following options: His Ala
  MISC_FEATURE (104)..(104): Xaa at this position is a single (one, 1) amino acid selected from the following options: His Ala
HHHHHHDYKDDDDKXRRRRRRRXMAVTALAARTWLGVWGVRTMQARGFGSESGDNVRSSAGAVRDAGGAFGKRXQAEEERYFRARAKEQLAALKKXXENEISXXAKEIERLQKEIERHKQSIKKLKQSEDDD

SEQ ID NO: 235 - protein, 108 aa, Artificial Sequence
  Designed; as detailed elsewhere in present application
  MISC_FEATURE (15)..(15): Xaa at this position is a single (one, 1) amino acid (or lack thereof) selected from the following options: Gly Pro or is absent (no amino acid at this position and so this position is not present)
  MISC_FEATURE (23)..(23): Xaa at this position is a single (one, 1) amino acid (or lack thereof) selected from the following options: Gly Pro or is absent (no amino acid at this position and so this position is not present)
  MISC_FEATURE (74)..(74): Xaa at this position is a single (one, 1) amino acid selected from the following options: Glu Gln Ala
  MISC_FEATURE (96)..(96): Xaa at this position is a single (one, 1) amino acid selected from the following options: His Tyr Ala
  MISC_FEATURE (97)..(97): Xaa at this position is a single (one, 1) amino acid selected from the following options: His Lys Ala
  MISC_FEATURE (103)..(103): Xaa at this position is a single (one, 1) amino acid selected from the following options: His Ala
  MISC_FEATURE (104)..(104): Xaa at this position is a single (one, 1) amino acid selected from the following options: His Ala
HHHHHHDYKDDDDKXRRRRRRRXMAVTALAARTWLGVWGVRTMQARGFGSESGDNVRSSAGAVRDAGGAFGKRXQAEEERYFRARAKEQLAALKKXXENEISXXAKEI

SEQ ID NO: 236 - protein, 99 aa, Artificial Sequence
  Designed; as detailed elsewhere in present application
  MISC_FEATURE (15)..(15): Xaa at this position is a single (one, 1) amino acid (or lack thereof) selected from the following options: Gly Pro or is absent (no amino acid at this position and so this position is not present)
  MISC_FEATURE (23)..(23): Xaa at this position is a single (one, 1) amino acid (or lack thereof) selected from the following options: Gly Pro or is absent (no amino acid at this position and so this position is not present)
  MISC_FEATURE (65)..(65): Xaa at this position is a single (one, 1) amino acid selected from the following options: Glu Gln Ala
  MISC_FEATURE (87)..(87): Xaa at this position is a single (one, 1) amino acid selected from the following options: His Tyr Ala
  MISC_FEATURE (88)..(88): Xaa at this position is a single (one, 1) amino acid selected from the following options: His Lys Ala
  MISC_FEATURE (94)..(94): Xaa at this position is a single (one, 1) amino acid selected from the following options: His Ala
  MISC_FEATURE (95)..(95): Xaa at this position is a single (one, 1) amino acid selected from the following options: His Ala
HHHHHHDYKDDDDKXRRRRRRRXMAVTALAARTWLGVWGVRTMQARGFSSAGAVRDAGGAFGKRXQAEEERYFRARAKEQLAALKKXXENEISXXAKEI

SEQ ID NO: 237 - protein, 95 aa, Artificial Sequence
  Designed; as detailed elsewhere in present application
  MISC_FEATURE (15)..(15): Xaa at this position is a single (one, 1) amino acid (or lack thereof) selected from the following options: Gly Pro or is absent (no amino acid at this position and so this position is not present)
  MISC_FEATURE (23)..(23): Xaa at this position is a single (one, 1) amino acid (or lack thereof) selected from the following options: Gly Pro or is absent (no amino acid at this position and so this position is not present)
  MISC_FEATURE (61)..(61): Xaa at this position is a single (one, 1) amino acid selected from the following options: Glu Gln Ala
  MISC_FEATURE (83)..(83): Xaa at this position is a single (one, 1) amino acid selected from the following options: His Tyr Ala
  MISC_FEATURE (84)..(84): Xaa at this position is a single (one, 1) amino acid selected from the following options: His Lys Ala
  MISC_FEATURE (90)..(90): Xaa at this position is a single (one, 1) amino acid selected from the following options: His Ala
  MISC_FEATURE (91)..(91): Xaa at this position is a single (one, 1) amino acid selected from the following options: His Ala
HHHHHHDYKDDDDKXRRRRRRRXMAVTALAARTWLGVWGVRTMQARGFAVRDAGGAFGKRXQAEEERYFRARAKEQLAALKKXXENEISXXAKEI

SEQ ID NO: 238 - protein, 83 aa, Artificial Sequence
  Designed; as detailed elsewhere in present application
  MISC_FEATURE (15)..(15): Xaa at this position is a single (one, 1) amino acid (or lack thereof) selected from the following options: Gly Pro or is absent (no amino acid at this position and so this position is not present)
  MISC_FEATURE (23)..(23): Xaa at this position is a single (one, 1) amino acid (or lack thereof) selected from the following options: Gly Pro or is absent (no amino acid at this position and so this position is not present)
  MISC_FEATURE (62)..(62): Xaa at this position is a single (one, 1) amino acid selected from the following options: Glu Gln Ala
HHHHHHDYKDDDDKXRRRRRRRXMAVTALAARTWLGVWGVRTMQARGFGAVRDAGGAFGKRXQAEEERYFRARAKEQLAALKK

SEQ ID NO: 239 - protein, 82 aa, Artificial Sequence
  Designed; as detailed elsewhere in present application
  MISC_FEATURE (15)..(15): Xaa at this position is a single (one, 1) amino acid (or lack thereof) selected from the following options: Gly Pro or is absent (no amino acid at this position and so this position is not present)
  MISC_FEATURE (23)..(23): Xaa at this position is a single (one, 1) amino acid (or lack thereof) selected from the following options: Gly Pro or is absent (no amino acid at this position and so this position is not present)
  MISC_FEATURE (61)..(61): Xaa at this position is a single (one, 1) amino acid selected from the following options: Glu Gln Ala
HHHHHHDYKDDDDKXRRRRRRRXMAVTALAARTWLGVWGVRTMQARGFAVRDAGGAFGKRXQAEEERYFRARAKEQLAALKK

SEQ ID NO: 240 - protein, 65 aa, Artificial Sequence
  Designed; as detailed elsewhere in present application
  MISC_FEATURE (15)..(15): Xaa at this position is a single (one, 1) amino acid (or lack thereof) selected from the following options: Gly Pro or is absent (no amino acid at this position and so this position is not present)
  MISC_FEATURE (23)..(23): Xaa at this position is a single (one, 1) amino acid (or lack thereof) selected from the following options: Gly Pro or is absent (no amino acid at this position and so this position is not present)
HHHHHHDYKDDDDKXRRRRRRRXMAVTALAARTWLGVWGVRTMQARGFLAALKKHHENEISHHAK

SEQ ID NO: 241 - protein, 132 aa, Artificial Sequence
  Designed; as detailed elsewhere in present application
  MISC_FEATURE (15)..(15): Xaa at this position is a single (one, 1) amino acid (or lack thereof) selected from the following options: Gly Pro or is absent (no amino acid at this position and so this position is not present)
  MISC_FEATURE (23)..(23): Xaa at this position is a single (one, 1) amino acid (or lack thereof) selected from the following options: Gly Pro or is absent (no amino acid at this position and so this position is not present)
  MISC_FEATURE (62)..(62): Xaa at this position is a single (one, 1) amino acid selected from the following options: Ser Ala
  MISC_FEATURE (74)..(74): Xaa at this position is a single (one, 1) amino acid selected from the following options: Glu Gln Ala
  MISC_FEATURE (96)..(96): Xaa at this position is a single (one, 1) amino acid selected from the following options: His Tyr Ala
  MISC_FEATURE (97)..(97): Xaa at this position is a single (one, 1) amino acid selected from the following options: His Lys Ala
  MISC_FEATURE (103)..(103): Xaa at this position is a single (one, 1) amino acid selected from the following options: His Ala
  MISC_FEATURE (104)..(104): Xaa at this position is a single (one, 1) amino acid selected from the following options: His Ala
  MISC_FEATURE (124)..(124): Xaa at this position is a single (one, 1) amino acid selected from the following options: Met Lys
  MISC_FEATURE (130)..(130): Asp or is absent (no amino acid at this position and so this position is not present)
  MISC_FEATURE (131)..(131): Asp or is absent (no amino acid at this position and so this position is not present)
  MISC_FEATURE (132)..(132): Asp or is absent (no amino acid at this position and so this position is not present)
HHHHHHDYKDDDDKXRRRRRRRXMAVTALAARTWLGVWGVRTMQARGFGSDQSENVDRGAGXIREAGGAFGKRXQAEEERYFRAQSREQLAALKKXXEEEIVXXKKEIERLQKEIERHKQKIKXLKHDDXXX

SEQ ID NO: 242 - protein, 108 aa, Artificial Sequence
  Designed; as detailed elsewhere in present application
  MISC_FEATURE (15)..(15): Xaa at this position is a single (one, 1) amino acid (or lack thereof) selected from the following options: Gly Pro or is absent (no amino acid at this position and so this position is not present)
  MISC_FEATURE (23)..(23): Xaa at this position is a single (one, 1) amino acid (or lack thereof) selected from the following options: Gly Pro or is absent (no amino acid at this position and so this position is not present)
  MISC_FEATURE (62)..(62): Xaa at this position is a single (one, 1) amino acid selected from the following options: Ser Ala
  MISC_FEATURE (74)..(74): Xaa at this position is a single (one, 1) amino acid selected from the following options: Glu Gln Ala
  MISC_FEATURE (96)..(96): Xaa at this position is a single (one, 1) amino acid selected from the following options: His Tyr Ala
  MISC_FEATURE (97)..(97): Xaa at this position is a single (one, 1) amino acid selected from the following options: His Lys Ala
  MISC_FEATURE (103)..(103): Xaa at this position is a single (one, 1) amino acid selected from the following options: His Ala
  MISC_FEATURE (104)..(104): Xaa at this position is a single (one, 1) amino acid selected from the following options: His Ala
HHHHHHDYKDDDDKXRRRRRRRXMAVTALAARTWLGVWGVRTMQARGFGSDQSENVDRGAGXIREAGGAFGKRXQAEEERYFRAQSREQLAALKKXXEEEIVXXKKEI

SEQ ID NO: 243 - protein, 99 aa, Artificial Sequence
  Designed; as detailed elsewhere in present application
  MISC_FEATURE (15)..(15): Xaa at this position is a single (one, 1) amino acid (or lack thereof) selected from the following options: Gly Pro or is absent (no amino acid at this position and so this position is not present)
  MISC_FEATURE (23)..(23): Xaa at this position is a single (one, 1) amino acid (or lack thereof) selected from the following options: Gly Pro or is absent (no amino acid at this position and so this position is not present)
  MISC_FEATURE (53)..(53): Xaa at this position is a single (one, 1) amino acid selected from the following options: Ser Ala
  MISC_FEATURE (65)..(65): Xaa at this position is a single (one, 1) amino acid selected from the following options: Glu Gln Ala
  MISC_FEATURE (87)..(87): Xaa at this position is a single (one, 1) amino acid selected from the following options: His Tyr Ala
  MISC_FEATURE (88)..(88): Xaa at this position is a single (one, 1) amino acid selected from the following options: His Lys Ala
  MISC_FEATURE (94)..(94): Xaa at this position is a single (one, 1) amino acid selected from the following options: His Ala
  MISC_FEATURE (95)..(95): Xaa at this position is a single (one, 1) amino acid selected from the following options: His Ala
HHHHHHDYKDDDDKXRRRRRRRXMAVTALAARTWLGVWGVRTMQARGFRGAGXIREAGGAFGKRXQAEEERYFRAQSREQLAALKKXXEEEIVXXKKEI

SEQ ID NO: 244 - protein, 95 aa, Artificial Sequence
  Designed; as detailed elsewhere in present application
  MISC_FEATURE (15)..(15): Xaa at this position is a single (one, 1) amino acid (or lack thereof) selected from the following options: Gly Pro or is absent (no amino acid at this position and so this position is not present)
  MISC_FEATURE (23)..(23): Xaa at this position is a single (one, 1) amino acid (or lack thereof) selected from the following options: Gly Pro or is absent (no amino acid at this position and so this position is not present)
  MISC_FEATURE (49)..(49): Xaa at this position is a single (one, 1) amino acid selected from the following options: Ser Ala
  MISC_FEATURE (61)..(61): Xaa at this position is a single (one, 1) amino acid selected from the following options: Glu Gln Ala
  MISC_FEATURE (83)..(83): Xaa at this position is a single (one, 1) amino acid selected from the following options: His Tyr Ala
  MISC_FEATURE (84)..(84): Xaa at this position is a single (one, 1) amino acid selected from the following options: His Lys Ala
  MISC_FEATURE (90)..(90): Xaa at this position is a single (one, 1) amino acid selected from the following options: His Ala
  MISC_FEATURE (91)..(91): Xaa at this position is a single (one, 1) amino acid selected from the following options: His Ala
HHHHHHDYKDDDDKXRRRRRRRXMAVTALAARTWLGVWGVRTMQARGFXIREAGGAFGKRXQAEEERYFRAQSREQLAALKKXXEEEIVXXKKEI

SEQ ID NO: 245 - protein, 83 aa, Artificial Sequence
  Designed; as detailed elsewhere in present application
  MISC_FEATURE (15)..(15): Xaa at this position is a single (one, 1) amino acid (or lack thereof) selected from the following options: Gly Pro or is absent (no amino acid at this position and so this position is not present)
  MISC_FEATURE (23)..(23): Xaa at this position is a single (one, 1) amino acid (or lack thereof) selected from the following options: Gly Pro or is absent (no amino acid at this position and so this position is not present)
  MISC_FEATURE (50)..(50): Xaa at this position is a single (one, 1) amino acid selected from the following options: Ser Ala
  MISC_FEATURE (62)..(62): Xaa at this position is a single (one, 1) amino acid selected from the following options: Glu Gln Ala
HHHHHHDYKDDDDKXRRRRRRRXMAVTALAARTWLGVWGVRTMQARGFGXIREAGGAFGKRXQAEEERYFRAQSREQLAALKK

SEQ ID NO: 246 - protein, 82 aa, Artificial Sequence
  Designed; as detailed elsewhere in present application
  MISC_FEATURE (15)..(15): Xaa at this position is a single (one, 1) amino acid (or lack thereof) selected from the following options: Gly Pro or is absent (no amino acid at this position and so this position is not present)
  MISC_FEATURE (23)..(23): Xaa at this position is a single (one, 1) amino acid (or lack thereof) selected from the following options: Gly Pro or is absent (no amino acid at this position and so this position is not present)
  MISC_FEATURE (49)..(49): Xaa at this position is a single (one, 1) amino acid selected from the following options: Ser Ala
  MISC_FEATURE (61)..(61): Xaa at this position is a single (one, 1) amino acid selected from the following options: Glu Gln Ala
HHHHHHDYKDDDDKXRRRRRRRXMAVTALAARTWLGVWGVRTMQARGFXIREAGGAFGKRXQAEEERYFRAQSREQLAALKK

SEQ ID NO: 247 - protein, 65 aa, Artificial Sequence
  Designed; as detailed elsewhere in present application
  MISC_FEATURE (15)..(15): Xaa at this position is a single (one, 1) amino acid (or lack thereof) selected from the following options: Gly Pro or is absent (no amino acid at this position and so this position is not present)
  MISC_FEATURE (23)..(23): Xaa at this position is a single (one, 1) amino acid (or lack thereof) selected from the following options: Gly Pro or is absent (no amino acid at this position and so this position is not present)
HHHHHHDYKDDDDKXRRRRRRRXMAVTALAARTWLGVWGVRTMQARGFLAALKKHHEEEIVHHKK

SEQ ID NO: 248 - protein, 132 aa, Artificial Sequence
  Designed; as detailed elsewhere in present application
  MISC_FEATURE (15)..(15): Xaa at this position is a single (one, 1) amino acid (or lack thereof) selected from the following options: Gly Pro or is absent (no amino acid at this position and so this position is not present)
  MISC_FEATURE (23)..(23): Xaa at this position is a single (one, 1) amino acid (or lack thereof) selected from the following options: Gly Pro or is absent (no amino acid at this position and so this position is not present)
  MISC_FEATURE (74)..(74): Xaa at this position is a single (one, 1) amino acid selected from the following options: Glu Gln Ala
  MISC_FEATURE (96)..(96): Xaa at this position is a single (one, 1) amino acid selected from the following options: His Tyr Ala
  MISC_FEATURE (97)..(97): Xaa at this position is a single (one, 1) amino acid selected from the following options: His Lys Ala
  MISC_FEATURE (103)..(103): Xaa at this position is a single (one, 1) amino acid selected from the following options: His Ala
  MISC_FEATURE (104)..(104): Xaa at this position is a single (one, 1) amino acid selected from the following options: His Ala
  MISC_FEATURE (131)..(131): Asp or is absent (no amino acid at this position and so this position is not present)
  MISC_FEATURE (132)..(132): Asp or is absent (no amino acid at this position and so this position is not present)
HHHHHHDYKDDDDKXRRRRRRRXMAVTALAARTWLGVWGVRTMQARGFGSESADNLGSSAGAIRDAGGAFGKKXQAEEERYFRARAKEQLAALKKXXENEISXXVKEIEHLQKEIERHKQSIKKLKHDDDXX

SEQ ID NO: 249 - protein, 108 aa, Artificial Sequence
  Designed; as detailed elsewhere in present application
  MISC_FEATURE (15)..(15): Xaa at this position is a single (one, 1) amino acid (or lack thereof) selected from the following options: Gly Pro or is absent (no amino acid at this position and so this position is not present)
  MISC_FEATURE (23)..(23): Xaa at this position is a single (one, 1) amino acid (or lack thereof) selected from the following options: Gly Pro or is absent (no amino acid at this position and so this position is not present)
  MISC_FEATURE (74)..(74): Xaa at this position is a single (one, 1) amino acid selected from the following options: Glu Gln Ala
  MISC_FEATURE (96)..(96): Xaa at this position is a single (one, 1) amino acid selected from the following options: His Tyr Ala
  MISC_FEATURE (97)..(97): Xaa at this position is a single (one, 1) amino acid selected from the following options: His Lys Ala
  MISC_FEATURE (103)..(103): Xaa at this position is a single (one, 1) amino acid selected from the following options: His Ala
  MISC_FEATURE (104)..(104): Xaa at this position is a single (one, 1) amino acid selected from the following options: His Ala
HHHHHHDYKDDDDKXRRRRRRRXMAVTALAARTWLGVWGVRTMQARGFGSESADNLGSSAGAIRDAGGAFGKKXQAEEERYFRARAKEQLAALKKXXENEISXXVKEI

SEQ ID NO: 250 - protein, 99 aa, Artificial Sequence
  Designed; as detailed elsewhere in present application
  MISC_FEATURE (15)..(15): Xaa at this position is a single (one, 1) amino acid (or lack thereof) selected from the following options: Gly Pro or is absent (no amino acid at this position and so this position is not present)
  MISC_FEATURE (23)..(23): Xaa at this position is a single (one, 1) amino acid (or lack thereof) selected from the following options: Gly Pro or is absent (no amino acid at this position and so this position is not present)
  MISC_FEATURE (65)..(65): Xaa at this position is a single (one, 1) amino acid selected from the following options: Glu Gln Ala
  MISC_FEATURE (87)..(87): Xaa at this position is a single (one, 1) amino acid selected from the following options: His Tyr Ala
  MISC_FEATURE (88)..(88): Xaa at this position is a single (one, 1) amino acid selected from the following options: His Lys Ala
  MISC_FEATURE (94)..(94): Xaa at this position is a single (one, 1) amino acid selected from the following options: His Ala
  MISC_FEATURE (95)..(95): Xaa at this position is a single (one, 1) amino acid selected from the following options: His Ala
HHHHHHDYKDDDDKXRRRRRRRXMAVTALAARTWLGVWGVRTMQARGFSSAGAIRDAGGAFGKKXQAEEERYFRARAKEQLAALKKXXENEISXXVKEI

SEQ ID NO: 251 - protein, 95 aa, Artificial Sequence
  Designed; as detailed elsewhere in present application
  MISC_FEATURE (15)..(15): Xaa at this position is a single (one, 1) amino acid (or lack thereof) selected from the following options: Gly Pro or is absent (no amino acid at this position and so this position is not present)
  MISC_FEATURE (23)..(23): Xaa at this position is a single (one, 1) amino acid (or lack thereof) selected from the following options: Gly Pro or is absent (no amino acid at this position and so this position is not present)
  MISC_FEATURE (61)..(61): Xaa at this position is a single (one, 1) amino acid selected from the following options: Glu Gln Ala
  MISC_FEATURE (83)..(83): Xaa at this position is a single (one, 1) amino acid selected from the following options: His Tyr Ala
  MISC_FEATURE (84)..(84): Xaa at this position is a single (one, 1) amino acid selected from the following options: His Lys Ala
  MISC_FEATURE (90)..(90): Xaa at this position is a single (one, 1) amino acid selected from the following options: His Ala
  MISC_FEATURE (91)..(91): Xaa at this position is a single (one, 1) amino acid selected from the following options: His Ala
HHHHHHDYKDDDDKXRRRRRRRXMAVTALAARTWLGVWGVRTMQARGFAIRDAGGAFGKKXQAEEERYFRARAKEQLAALKKXXENEISXXVKEI

SEQ ID NO: 252 - protein, 83 aa, Artificial Sequence
  Designed; as detailed elsewhere in present application
  MISC_FEATURE (15)..(15): Xaa at this position is a single (one, 1) amino acid (or lack thereof) selected from the following options: Gly Pro or is absent (no amino acid at this position and so this position is not present)
  MISC_FEATURE (23)..(23): Xaa at this position is a single (one, 1) amino acid (or lack thereof) selected from the following options: Gly Pro or is absent (no amino acid at this position and so this position is not present)
  MISC_FEATURE (62)..(62): Xaa at this position is a single (one, 1) amino acid selected from the following options: Glu Gln Ala
HHHHHHDYKDDDDKXRRRRRRRXMAVTALAARTWLGVWGVRTMQARGFGAIRDAGGAFGKKXQAEEERYFRARAKEQLAALKK

SEQ ID NO: 253 - protein, 82 aa, Artificial Sequence
  Designed; as detailed elsewhere in present application
  MISC_FEATURE (15)..(15): Xaa at this position is a single (one, 1) amino acid (or lack thereof) selected from the following options: Gly Pro or is absent (no amino acid at this position and so this position is not present)
  MISC_FEATURE (23)..(23): Xaa at this position is a single (one, 1) amino acid (or lack thereof) selected from the following options: Gly Pro or is absent (no amino acid at this position and so this position is not present)
  MISC_FEATURE (61)..(61): Xaa at this position is a single (one, 1) amino acid selected from the following options: Glu Gln Ala
HHHHHHDYKDDDDKXRRRRRRRXMAVTALAARTWLGVWGVRTMQARGFAIRDAGGAFGKKXQAEEERYFRARAKEQLAALKK

SEQ ID NO: 254 - protein, 65 aa, Artificial Sequence
  Designed; as detailed elsewhere in present application
  MISC_FEATURE (15)..(15): Xaa at this position is a single (one, 1) amino acid (or lack thereof) selected from the following options: Gly Pro or is absent (no amino acid at this position and so this position is not present)
  MISC_FEATURE (23)..(23): Xaa at this position is a single (one, 1) amino acid (or lack thereof) selected from the following options: Gly Pro or is absent (no amino acid at this position and so this position is not present)
HHHHHHDYKDDDDKXRRRRRRRXMAVTALAARTWLGVWGVRTMQARGFLAALKKHHENEISHHVK

SEQ ID NO: 255 - protein, 132 aa, Artificial Sequence
  Designed; as detailed elsewhere in present application
  MISC_FEATURE (15)..(15): Xaa at this position is a single (one, 1) amino acid (or lack thereof) selected from the following options: Gly Pro or is absent (no amino acid at this position and so this position is not present)
  MISC_FEATURE (23)..(23): Xaa at this position is a single (one, 1) amino acid (or lack thereof) selected from the following options: Gly Pro or is absent (no amino acid at this position and so this position is not present)
  MISC_FEATURE (62)..(62): Xaa at this position is a single (one, 1) amino acid selected from the following options: Thr Ala
  MISC_FEATURE (74)..(74): Xaa at this position is a single (one, 1) amino acid selected from the following options: Glu Gln Ala
  MISC_FEATURE (96)..(96): Xaa at this position is a single (one, 1) amino acid selected from the following options: His Tyr Ala
  MISC_FEATURE (97)..(97): Xaa at this position is a single (one, 1) amino acid selected from the following options: His Lys Ala
  MISC_FEATURE (103)..(103): Xaa at this position is a single (one, 1) amino acid selected from the following options: His Ala
  MISC_FEATURE (104)..(104): Xaa at this position is a single (one, 1) amino acid selected from the following options: His Ala
  MISC_FEATURE (131)..(131): Asp or is absent (no amino acid at this position and so this position is not present)
  MISC_FEATURE (132)..(132): Asp or is absent (no amino acid at this position and so this position is not present)
HHHHHHDYKDDDDKXRRRRRRRXMAVTALAARTWLGVWGVRTMQARGFGSEPADNLGSSEAXVWNAGVDFRKRXQAKGERYLRARAKEQLAALKKXXENEISXXVKEIEHLQKEIERHKQSIKKLKHDDDXX

SEQ ID NO: 256 - protein, 108 aa, Artificial Sequence
  Designed; as detailed elsewhere in present application
  MISC_FEATURE (15)..(15): Xaa at this position is a single (one, 1) amino acid (or lack thereof) selected from the following options: Gly Pro or is absent (no amino acid at this position and so this position is not present)
  MISC_FEATURE (23)..(23): Xaa at this position is a single (one, 1) amino acid (or lack thereof) selected from the following options: Gly Pro or is absent (no amino acid at this position and so this position is not present)
  MISC_FEATURE (62)..(62): Xaa at this position is a single (one, 1) amino acid selected from the following options: Thr Ala
  MISC_FEATURE (74)..(74): Xaa at this position is a single (one, 1) amino acid selected from the following options: Glu Gln Ala
  MISC_FEATURE (96)..(96): Xaa at this position is a single (one, 1) amino acid selected from the following options: His Tyr Ala
  MISC_FEATURE (97)..(97): Xaa at this position is a single (one, 1) amino acid selected from the following options: His Lys Ala
  MISC_FEATURE (103)..(103): Xaa at this position is a single (one, 1) amino acid selected from the following options: His Ala
  MISC_FEATURE (104)..(104): Xaa at this position is a single (one, 1) amino acid selected from the following options: His Ala
HHHHHHDYKDDDDKXRRRRRRRXMAVTALAARTWLGVWGVRTMQARGFGSEPADNLGSSEAXVWNAGVDFRKRXQAKGERYLRARAKEQLAALKKXXENEISXXVKEI

SEQ ID NO: 257 - protein, 95 aa, Artificial Sequence
  Designed; as detailed elsewhere in present application
  MISC_FEATURE (15)..(15): Xaa at this position is a single (one, 1) amino acid (or lack thereof) selected from the following options: Gly Pro or is absent (no amino acid at this position and so this position is not present)
  MISC_FEATURE (23)..(23): Xaa at this position is a single (one, 1) amino acid (or lack thereof) selected from the following options: Gly Pro or is absent (no amino acid at this position and so this position is not present)
  MISC_FEATURE (49)..(49): Xaa at this position is a single (one, 1) amino acid selected from the following options: Thr Ala
  MISC_FEATURE (61)..(61): Xaa at this position is a single (one, 1) amino acid selected from the following options: Glu Gln Ala
  MISC_FEATURE (83)..(83): Xaa at this position is a single (one, 1) amino acid selected from the following options: His Tyr Ala
  MISC_FEATURE (84)..(84): Xaa at this position is a single (one, 1) amino acid selected from the following options: His Lys Ala
  MISC_FEATURE (90)..(90): Xaa at this position is a single (one, 1) amino acid selected from the following options: His Ala
  MISC_FEATURE (91)..(91): Xaa at this position is a single (one, 1) amino acid selected from the following options: His Ala
HHHHHHDYKDDDDKXRRRRRRRXMAVTALAARTWLGVWGVRTMQARGFXVWNAGVDFRKRXQAKGERYLRARAKEQLAALKKXXENEISXXVKEI

SEQ ID NO: 258 - protein, 83 aa, Artificial Sequence
  Designed; as detailed elsewhere in present application
  MISC_FEATURE (15)..(15): Xaa at this position is a single (one, 1) amino acid (or lack thereof) selected from the following options: Gly Pro or is absent (no amino acid at this position and so this position is not present)
  MISC_FEATURE (23)..(23): Xaa at this position is a single (one, 1) amino acid (or lack thereof) selected from the following options: Gly Pro or is absent (no amino acid at this position and so this position is not present)
  MISC_FEATURE (50)..(50): Xaa at this position is a single (one, 1) amino acid selected from the following options: Thr Ala
  MISC_FEATURE (62)..(62): Xaa at this position is a single (one, 1) amino acid selected from the following options: Glu Gln Ala
HHHHHHDYKDDDDKXRRRRRRRXMAVTALAARTWLGVWGVRTMQARGFAXVWNAGVDFRKRXQAKGERYLRARAKEQLAALKK

SEQ ID NO: 259 - protein, 82 aa, Artificial Sequence
  Designed; as detailed elsewhere in present application
  MISC_FEATURE (15)..(15): Xaa at this position is a single (one, 1) amino acid (or lack thereof) selected from the following options: Gly Pro or is absent (no amino acid at this position and so this position is not present)
  MISC_FEATURE (23)..(23): Xaa at this position is a single (one, 1) amino acid (or lack thereof) selected from the following options: Gly Pro or is absent (no amino acid at this position and so this position is not present)
  MISC_FEATURE (49)..(49): Xaa at this position is a single (one, 1) amino acid selected from the following options: Thr Ala
  MISC_FEATURE (61)..(61): Xaa at this position is a single (one, 1) amino acid selected from the following options: Glu Gln Ala
HHHHHHDYKDDDDKXRRRRRRRXMAVTALAARTWLGVWGVRTMQARGFXVWNAGVDFRKRXQAKGERYLRARAKEQLAALKK

SEQ ID NO: 260 - protein, 65 aa, Artificial Sequence; identical to SEQ ID NO: 254
  Designed; as detailed elsewhere in present application
  MISC_FEATURE (15)..(15): Xaa at this position is a single (one, 1) amino acid (or lack thereof) selected from the following options: Gly Pro or is absent (no amino acid at this position and so this position is not present)
  MISC_FEATURE (23)..(23): Xaa at this position is a single (one, 1) amino acid (or lack thereof) selected from the following options: Gly Pro or is absent (no amino acid at this position and so this position is not present)

SEQ ID NO: 261 - protein, 132 aa, Artificial Sequence
  Designed; as detailed elsewhere in present application
  MISC_FEATURE (15)..(15): Xaa at this position is a single (one, 1) amino acid (or lack thereof) selected from the following options: Gly Pro or is absent (no amino acid at this position and so this position is not present)
  MISC_FEATURE (23)..(23): Xaa at this position is a single (one, 1) amino acid (or lack thereof) selected from the following options: Gly Pro or is absent (no amino acid at this position and so this position is not present)
  MISC_FEATURE (74)..(74): Xaa at this position is a single (one, 1) amino acid selected from the following options: Glu Gln Ala
  MISC_FEATURE (96)..(96): Xaa at this position is a single (one, 1) amino acid selected from the following options: His Tyr Ala
  MISC_FEATURE (97)..(97): Xaa at this position is a single (one, 1) amino acid selected from the following options: His Lys Ala
  MISC_FEATURE (103)..(103): Xaa at this position is a single (one, 1) amino acid selected from the following options: His Ala
  MISC_FEATURE (104)..(104): Xaa at this position is a single (one, 1) amino acid selected from the following options: His Ala
  MISC_FEATURE (131)..(131): Asp or is absent (no amino acid at this position and so this position is not present)
  MISC_FEATURE (132)..(132): Asp or is absent (no amino acid at this position and so this position is not present)
HHHHHHDYKDDDDKXRRRRRRRXMAVTALAARTWLGVWGVRTMQARGFGSESADNLGSSAGAVRDAGGAFGKKXQAEEERYFRARAKEQLAALKKXXENEISXXVKEIEHLQKEIERHKQSIKKLKHDDDXX

SEQ ID NO: 262 - protein, 108 aa, Artificial Sequence
  Designed; as detailed elsewhere in present application
  MISC_FEATURE (15)..(15): Xaa at this position is a single (one, 1) amino acid (or lack thereof) selected from the following options: Gly Pro or is absent (no amino acid at this position and so this position is not present)
  MISC_FEATURE (23)..(23): Xaa at this position is a single (one, 1) amino acid (or lack thereof) selected from the following options: Gly Pro or is absent (no amino acid at this position and so this position is not present)
  MISC_FEATURE (74)..(74): Xaa at this position is a single (one, 1) amino acid selected from the following options: Glu Gln Ala
  MISC_FEATURE (96)..(96): Xaa at this position is a single (one, 1) amino acid selected from the following options: His Tyr Ala
  MISC_FEATURE (97)..(97): Xaa at this position is a single (one, 1) amino acid selected from the following options: His Lys Ala
  MISC_FEATURE (103)..(103): Xaa at this position is a single (one, 1) amino acid selected from the following options: His Ala
  MISC_FEATURE (104)..(104): Xaa at this position is a single (one, 1) amino acid selected from the following options: His Ala
HHHHHHDYKDDDDKXRRRRRRRXMAVTALAARTWLGVWGVRTMQARGFGSESADNLGSSAGAVRDAGGAFGKKXQAEEERYFRARAKEQLAALKKXXENEISXXVKEI

SEQ ID NO: 263 - protein, 95 aa, Artificial Sequence
  Designed; as detailed elsewhere in present application
  MISC_FEATURE (15)..(15): Xaa at this position is a single (one, 1) amino acid (or lack thereof) selected from the following options: Gly Pro or is absent (no amino acid at this position and so this position is not present)
  MISC_FEATURE (23)..(23): Xaa at this position is a single (one, 1) amino acid (or lack thereof) selected from the following options: Gly Pro or is absent (no amino acid at this position and so this position is not present)
  MISC_FEATURE (61)..(61): Xaa at this position is a single (one, 1) amino acid selected from the following options: Glu Gln Ala
  MISC_FEATURE (83)..(83): Xaa at this position is a single (one, 1) amino acid selected from the following options: His Tyr Ala
  MISC_FEATURE (84)..(84): Xaa at this position is a single (one, 1) amino acid selected from the following options: His Lys Ala
  MISC_FEATURE (90)..(90): Xaa at this position is a single (one, 1) amino acid selected from the following options: His Ala
  MISC_FEATURE (91)..(91): Xaa at this position is a single (one, 1) amino acid selected from the following options: His Ala
HHHHHHDYKDDDDKXRRRRRRRXMAVTALAARTWLGVWGVRTMQARGFAVRDAGGAFGKKXQAEEERYFRARAKEQLAALKKXXENEISXXVKEI

SEQ ID NO: 264 - protein, 83 aa, Artificial Sequence
  Designed; as detailed elsewhere in present application
  MISC_FEATURE (15)..(15): Xaa at this position is a single (one, 1) amino acid (or lack thereof) selected from the following options: Gly Pro or is absent (no amino acid at this position and so this position is not present)
  MISC_FEATURE (23)..(23): Xaa at this position is a single (one, 1) amino acid (or lack thereof) selected from the following options: Gly Pro or is absent (no amino acid at this position and so this position is not present)
  MISC_FEATURE (62)..(62): Xaa at this position is a single (one, 1) amino acid selected from the following options: Glu Gln Ala
HHHHHHDYKDDDDKXRRRRRRRXMAVTALAARTWLGVWGVRTMQARGFGAVRDAGGAFGKKXQAEEERYFRARAKEQLAALKK

SEQ ID NO: 265 - protein, 82 aa, Artificial Sequence
  Designed; as detailed elsewhere in present application
  MISC_FEATURE (15)..(15): Xaa at this position is a single (one, 1) amino acid (or lack thereof) selected from the following options: Gly Pro or is absent (no amino acid at this position and so this position is not present)
  MISC_FEATURE (23)..(23): Xaa at this position is a single (one, 1) amino acid (or lack thereof) selected from the following options: Gly Pro or is absent (no amino acid at this position and so this position is not present)
  MISC_FEATURE (61)..(61): Xaa at this position is a single (one, 1) amino acid selected from the following options: Glu Gln Ala
HHHHHHDYKDDDDKXRRRRRRRXMAVTALAARTWLGVWGVRTMQARGFAVRDAGGAFGKKXQAEEERYFRARAKEQLAALKK

SEQ ID NO: 266 - protein, 65 aa, Artificial Sequence; identical to SEQ ID NO: 254
  Designed; as detailed elsewhere in present application
  MISC_FEATURE (15)..(15): Xaa at this position is a single (one, 1) amino acid (or lack thereof) selected from the following options: Gly Pro or is absent (no amino acid at this position and so this position is not present)
  MISC_FEATURE (23)..(23): Xaa at this position is a single (one, 1) amino acid (or lack thereof) selected from the following options: Gly Pro or is absent (no amino acid at this position and so this position is not present)

SEQ ID NO: 267 - protein, 132 aa, Artificial Sequence
  Designed; as detailed elsewhere in present application
  MISC_FEATURE (15)..(15): Xaa at this position is a single (one, 1) amino acid (or lack thereof) selected from the following options: Gly Pro or is absent (no amino acid at this position and so this position is not present)
  MISC_FEATURE (23)..(23): Xaa at this position is a single (one, 1) amino acid (or lack thereof) selected from the following options: Gly Pro or is absent (no amino acid at this position and so this position is not present)
  MISC_FEATURE (62)..(62): Xaa at this position is a single (one, 1) amino acid selected from the following options: Ser Ala
  MISC_FEATURE (74)..(74): Xaa at this position is a single (one, 1) amino acid selected from the following options: Glu Gln Ala
  MISC_FEATURE (96)..(96): Xaa at this position is a single (one, 1) amino acid selected from the following options: His Tyr Ala
  MISC_FEATURE (97)..(97): Xaa at this position is a single (one, 1) amino acid selected from the following options: His Lys Ala
  MISC_FEATURE (103)..(103): Xaa at this position is a single (one, 1) amino acid selected from the following options: His Ala
  MISC_FEATURE (104)..(104): Xaa at this position is a single (one, 1) amino acid selected from the following options: His Ala
  MISC_FEATURE (132)..(132): Asp or is absent (no amino acid at this position and so this position is not present)
HHHHHHDYKDDDDKXRRRRRRRXMAVTALAARTWLGVWGVRTMQARGFLGSGAGKGGGGGGXIREAGGAFGKRXAAHEERYFREKEREQLASLREXXEEEIDXXKKEIQRLQKEIDRHKNKIKKLKGDDDDX

SEQ ID NO: 268 - protein, 108 aa, Artificial Sequence
  Designed; as detailed elsewhere in present application
  MISC_FEATURE (15)..(15): Xaa at this position is a single (one, 1) amino acid (or lack thereof) selected from the following options: Gly Pro or is absent (no amino acid at this position and so this position is not present)
  MISC_FEATURE (23)..(23): Xaa at this position is a single (one, 1) amino acid (or lack thereof) selected from the following options: Gly Pro or is absent (no amino acid at this position and so this position is not present)
  MISC_FEATURE (62)..(62): Xaa at this position is a single (one, 1) amino acid selected from the following options: Ser Ala
  MISC_FEATURE (74)..(74): Xaa at this position is a single (one, 1) amino acid selected from the following options: Glu Gln Ala
  MISC_FEATURE (96)..(96): Xaa at this position is a single (one, 1) amino acid selected from the following options: His Tyr Ala
  MISC_FEATURE (97)..(97): Xaa at this position is a single (one, 1) amino acid selected from the following options: His Lys Ala
  MISC_FEATURE (103)..(103): Xaa at this position is a single (one, 1) amino acid selected from the following options: His Ala
  MISC_FEATURE (104)..(104): Xaa at this position is a single (one, 1) amino acid selected from the following options: His Ala
HHHHHHDYKDDDDKXRRRRRRRXMAVTALAARTWLGVWGVRTMQARGFLGSGAGKGGGGGGXIREAGGAFGKRXAAHEERYFREKEREQLASLREXXEEEIDXXKKEI

SEQ ID NO: 269 - protein, 99 aa, Artificial Sequence
  Designed; as detailed elsewhere in present application
  MISC_FEATURE (15)..(15): Xaa at this position is a single (one, 1) amino acid (or lack thereof) selected from the following options: Gly Pro or is absent (no amino acid at this position and so this position is not present)
  MISC_FEATURE (23)..(23): Xaa at this position is a single (one, 1) amino acid (or lack thereof) selected from the following options: Gly Pro or is absent (no amino acid at this position and so this position is not present)
  MISC_FEATURE (53)..(53): Xaa at this position is a single (one, 1) amino acid selected from the following options: Ser Ala
  MISC_FEATURE (65)..(65): Xaa at this position is a single (one, 1) amino acid selected from the following options: Glu Gln Ala
  MISC_FEATURE (87)..(87): Xaa at this position is a single (one, 1) amino acid selected from the following options: His Tyr Ala
  MISC_FEATURE (88)..(88): Xaa at this position is a single (one, 1) amino acid selected from the following options: His Lys Ala
  MISC_FEATURE (94)..(94): Xaa at this position is a single (one, 1) amino acid selected from the following options: His Ala
  MISC_FEATURE (95)..(95): Xaa at this position is a single (one, 1) amino acid selected from the following options: His Ala
HHHHHHDYKDDDDKXRRRRRRRXMAVTALAARTWLGVWGVRTMQARGFGGGGXIREAGGAFGKRXAAHEERYFREKEREQLASLREXXEEEIDXXKKEI

SEQ ID NO: 270 - protein, 95 aa, Artificial Sequence
  Designed; as detailed elsewhere in present application
  MISC_FEATURE (15)..(15): Xaa at this position is a single (one, 1) amino acid (or lack thereof) selected from the following options: Gly Pro or is absent (no amino acid at this position and so this position is not present)
  MISC_FEATURE (23)..(23): Xaa at this position is a single (one, 1) amino acid (or lack thereof) selected from the following options: Gly Pro or is absent (no amino acid at this position and so this position is not present)
  MISC_FEATURE (49)..(49): Xaa at this position is a single (one, 1) amino acid selected from the following options: Ser Ala
  MISC_FEATURE (61)..(61): Xaa at this position is a single (one, 1) amino acid selected from the following options: Glu Gln Ala
  MISC_FEATURE (83)..(83): Xaa at this position is a single (one, 1) amino acid selected from the following options: His Tyr Ala
  MISC_FEATURE (84)..(84): Xaa at this position is a single (one, 1) amino acid selected from the following options: His Lys Ala
  MISC_FEATURE (90)..(90): Xaa at this position is a single (one, 1) amino acid selected from the following options: His Ala
  MISC_FEATURE (91)..(91): Xaa at this position is a single (one, 1) amino acid selected from the following options: His Ala
HHHHHHDYKDDDDKXRRRRRRRXMAVTALAARTWLGVWGVRTMQARGFXIREAGGAFGKRXAAHEERYFREKEREQLASLREXXEEEIDXXKKEI

SEQ ID NO: 271 - protein, 83 aa, Artificial Sequence
  Designed; as detailed elsewhere in present application
  MISC_FEATURE (15)..(15): Xaa at this position is a single (one, 1) amino acid (or lack thereof) selected from the following options: Gly Pro or is absent (no amino acid at this position and so this position is not present)
  MISC_FEATURE (23)..(23): Xaa at this position is a single (one, 1) amino acid (or lack thereof) selected from the following options: Gly Pro or is absent (no amino acid at this position and so this position is not present)
  MISC_FEATURE (50)..(50): Xaa at this position is a single (one, 1) amino acid selected from the following options: Ser Ala
  MISC_FEATURE (62)..(62): Xaa at this position is a single (one, 1) amino acid selected from the following options: Glu Gln Ala
HHHHHHDYKDDDDKXRRRRRRRXMAVTALAARTWLGVWGVRTMQARGFGXIREAGGAFGKRXAAHEERYFREKEREQLASLRE

SEQ ID NO: 272 - protein, 82 aa, Artificial Sequence
  Designed; as detailed elsewhere in present application
  MISC_FEATURE (15)..(15): Xaa at this position is a single (one, 1) amino acid (or lack thereof) selected from the following options: Gly Pro or is absent (no amino acid at this position and so this position is not present)
  MISC_FEATURE (23)..(23): Xaa at this position is a single (one, 1) amino acid (or lack thereof) selected from the following options: Gly Pro or is absent (no amino acid at this position and so this position is not present)
  MISC_FEATURE (49)..(49): Xaa at this position is a single (one, 1) amino acid selected from the following options: Ser Ala
  MISC_FEATURE (61)..(61): Xaa at this position is a single (one, 1) amino acid selected from the following options: Glu Gln Ala
HHHHHHDYKDDDDKXRRRRRRRXMAVTALAARTWLGVWGVRTMQARGFXIREAGGAFGKRXAAHEERYFREKEREQLASLRE

SEQ ID NO: 273 - protein, 65 aa, Artificial Sequence
  Designed; as detailed elsewhere in present application
  MISC_FEATURE (15)..(15): Xaa at this position is a single (one, 1) amino acid (or lack thereof) selected from the following options: Gly Pro or is absent (no amino acid at this position and so this position is not present)
  MISC_FEATURE (23)..(23): Xaa at this position is a single (one, 1) amino acid (or lack thereof) selected from the following options: Gly Pro or is absent (no amino acid at this position and so this position is not present)
HHHHHHDYKDDDDKXRRRRRRRXMAVTALAARTWLGVWGVRTMQARGFLASLREYHEEEIDHHKK

SEQ ID NO: 274 - protein, 132 aa, Artificial Sequence
  Designed; as detailed elsewhere in present application
  MISC_FEATURE (15)..(15): Xaa at this position is a single (one, 1) amino acid (or lack thereof) selected from the following options: Gly Pro or is absent (no amino acid at this position and so this position is not present)
  MISC_FEATURE (23)..(23): Xaa at this position is a single (one, 1) amino acid (or lack thereof) selected from the following options: Gly Pro or is absent (no amino acid at this position and so this position is not present)
  MISC_FEATURE (62)..(62): Xaa at this position is a single (one, 1) amino acid selected from the following options: Ser Ala
  MISC_FEATURE (74)..(74): Xaa at this position is a single (one, 1) amino acid selected from the following options: Glu Gln Ala
  MISC_FEATURE (96)..(96): Xaa at this position is a single (one, 1) amino acid selected from the following options: His Tyr Ala
  MISC_FEATURE (97)..(97): Xaa at this position is a single (one, 1) amino acid selected from the following options: His Lys Ala
  MISC_FEATURE (103)..(103): Xaa at this position is a single (one, 1) amino acid selected from the following options: His Ala
  MISC_FEATURE (104)..(104): Xaa at this position is a single (one, 1) amino acid selected from the following options: His Ala
  MISC_FEATURE (131)..(131): Asp or is absent (no amino acid at this position and so this position is not present)
  MISC_FEATURE (132)..(132): Asp or is absent (no amino acid at this position and so this position is not present)
HHHHHHDYKDDDDKXRRRRRRRXMAVTALAARTWLGVWGVRTMQARGFLGSGAGKGGGGGGXIREAGGAFGKRXAAHEERYFRDKEREQLASLREXXEEEIDXXKKEIQRLQKEIDRHKNKIKKLKGDDDXX

SEQ ID NO: 275 - protein, 108 aa, Artificial Sequence
  Designed; as detailed elsewhere in present application
  MISC_FEATURE (15)..(15): Xaa at this position is a single (one, 1) amino acid (or lack thereof) selected from the following options: Gly Pro or is absent (no amino acid at this position and so this position is not present)
  MISC_FEATURE (23)..(23): Xaa at this position is a single (one, 1) amino acid (or lack thereof) selected from the following options: Gly Pro or is absent (no amino acid at this position and so this position is not present)
  MISC_FEATURE (62)..(62): Xaa at this position is a single (one, 1) amino acid selected from the following options: Ser Ala
  MISC_FEATURE (74)..(74): Xaa at this position is a single (one, 1) amino acid selected from the following options: Glu Gln Ala
  MISC_FEATURE (96)..(96): Xaa at this position is a single (one, 1) amino acid selected from the following options: His Tyr Ala
  MISC_FEATURE (97)..(97): Xaa at this position is a single (one, 1) amino acid selected from the following options: His Lys Ala
  MISC_FEATURE (103)..(103): Xaa at this position is a single (one, 1) amino acid selected from the following options: His Ala
  MISC_FEATURE (104)..(104): Xaa at this position is a single (one, 1) amino acid selected from the following options: His Ala
HHHHHHDYKDDDDKXRRRRRRRXMAVTALAARTWLGVWGVRTMQARGFLGSGAGKGGGGGGXIREAGGAFGKRXAAHEERYFRDKEREQLASLREXXEEEIDXXKKEI

SEQ ID NO: 276 - protein, 99 aa, Artificial Sequence
  Designed; as detailed elsewhere in present application
  MISC_FEATURE (15)..(15): Xaa at this position is a single (one, 1) amino acid (or lack thereof) selected from the following options: Gly Pro or is absent (no amino acid at this position and so this position is not present)
  MISC_FEATURE (23)..(23): Xaa at this position is a single (one, 1) amino acid (or lack thereof) selected from the following options: Gly Pro or is absent (no amino acid at this position and so this position is not present)
  MISC_FEATURE (53)..(53): Xaa at this position is a single (one, 1) amino acid selected from the following options: Ser Ala
  MISC_FEATURE (65)..(65): Xaa at this position is a single (one, 1) amino acid selected from the following options: Glu Gln Ala
  MISC_FEATURE (87)..(87): Xaa at this position is a single (one, 1) amino acid selected from the following options: His Tyr Ala
  MISC_FEATURE (88)..(88): Xaa at this position is a single (one, 1) amino acid selected from the following options: His Lys Ala
  MISC_FEATURE (94)..(94): Xaa at this position is a single (one, 1) amino acid selected from the following options: His Ala
  MISC_FEATURE (95)..(95): Xaa at this position is a single (one, 1) amino acid selected from the following options: His Ala
HHHHHHDYKDDDDKXRRRRRRRXMAVTALAARTWLGVWGVRTMQARGFGGGGXIREAGGAFGKRXAAHEERYFRDKEREQLASLREXXEEEIDXXKKEI

SEQ ID NO: 277 - protein, 95 aa, Artificial Sequence
  Designed; as detailed elsewhere in present application
  MISC_FEATURE (15)..(15): Xaa at this position is a single (one, 1) amino acid (or lack thereof) selected from the following options: Gly Pro or is absent (no amino acid at this position and so this position is not present)
  MISC_FEATURE (23)..(23): Xaa at this position is a single (one, 1) amino acid (or lack thereof) selected from the following options: Gly Pro or is absent (no amino acid at this position and so this position is not present)
  MISC_FEATURE (49)..(49): Xaa at this position is a single (one, 1) amino acid selected from the following options: Ser Ala
  MISC_FEATURE (61)..(61): Xaa at this position is a single (one, 1) amino acid selected from the following options: Glu Gln Ala
  MISC_FEATURE (83)..(83): Xaa at this position is a single (one, 1) amino acid selected from the following options: His Tyr Ala
  MISC_FEATURE (84)..(84): Xaa at this position is a single (one, 1) amino acid selected from the following options: His Lys Ala
  MISC_FEATURE (90)..(90): Xaa at this position is a single (one, 1) amino acid selected from the following options: His Ala
  MISC_FEATURE (91)..(91): Xaa at this position is a single (one, 1) amino acid selected from the following options: His Ala
HHHHHHDYKDDDDKXRRRRRRRXMAVTALAARTWLGVWGVRTMQARGFXIREAGGAFGKRXAAHEERYFRDKEREQLASLREXXEEEIDXXKKEI

SEQ ID NO: 278 - protein, 83 aa, Artificial Sequence
  Designed; as detailed elsewhere in present application
  MISC_FEATURE (15)..(15): Xaa at this position is a single (one, 1) amino acid (or lack thereof) selected from the following options: Gly Pro or is absent (no amino acid at this position and so this position is not present)
  MISC_FEATURE (23)..(23): Xaa at this position is a single (one, 1) amino acid (or lack thereof) selected from the following options: Gly Pro or is absent (no amino acid at this position and so this position is not present)
  MISC_FEATURE (50)..(50): Xaa at this position is a single (one, 1) amino acid selected from the following options: Ser Ala
  MISC_FEATURE (62)..(62): Xaa at this position is a single (one, 1) amino acid selected from the following options: Glu Gln Ala
HHHHHHDYKDDDDKXRRRRRRRXMAVTALAARTWLGVWGVRTMQARGFGXIREAGGAFGKRXAAHEERYFRDKEREQLASLRE

SEQ ID NO: 279 - protein, 82 aa, Artificial Sequence
  Designed; as detailed elsewhere in present application
  MISC_FEATURE (15)..(15): Xaa at this position is a single (one, 1) amino acid (or lack thereof) selected from the following options: Gly Pro or is absent (no amino acid at this position and so this position is not present)
  MISC_FEATURE (23)..(23): Xaa at this position is a single (one, 1) amino acid (or lack thereof) selected from the following options: Gly Pro or is absent (no amino acid at this position and so this position is not present)
  MISC_FEATURE (49)..(49): Xaa at this position is a single (one, 1) amino acid selected from the following options: Ser Ala
  MISC_FEATURE (61)..(61): Xaa at this position is a single (one, 1) amino acid selected from the following options: Glu Gln Ala
HHHHHHDYKDDDDKXRRRRRRRXMAVTALAARTWLGVWGVRTMQARGFXIREAGGAFGKRXAAHEERYFRDKEREQLASLRE

SEQ ID NO: 280 - protein, 65 aa, Artificial Sequence
  Designed; as detailed elsewhere in present application
  MISC_FEATURE (15)..(15): Xaa at this position is a single (one, 1) amino acid (or lack thereof) selected from the following options: Gly Pro or is absent (no amino acid at this position and so this position is not present)
  MISC_FEATURE (23)..(23): Xaa at this position is a single (one, 1) amino acid (or lack thereof) selected from the following options: Gly Pro or is absent (no amino acid at this position and so this position is not present)
HHHHHHDYKDDDDKXRRRRRRRXMAVTALAARTWLGVWGVRTMQARGFLASLREHHEEEIDHHKK

SEQ ID NO: 281 - protein, 132 aa, Artificial Sequence
  Designed; as detailed elsewhere in present application
  MISC_FEATURE (15)..(15): Xaa at this position is a single (one, 1) amino acid (or lack thereof) selected from the following options: Gly Pro or is absent (no amino acid at this position and so this position is not present)
  MISC_FEATURE (23)..(23): Xaa at this position is a single (one, 1) amino acid (or lack thereof) selected from the following options: Gly Pro or is absent (no amino acid at this position and so this position is not present)
  MISC_FEATURE (62)..(62): Xaa at this position is a single (one, 1) amino acid selected from the following options: Ser Ala
  MISC_FEATURE (74)..(74): Xaa at this position is a single (one, 1) amino acid selected from the following options: Glu Gln Ala
  MISC_FEATURE (96)..(96): Xaa at this position is a single (one, 1) amino acid selected from the following options: His Tyr Ala
  MISC_FEATURE (97)..(97): Xaa at this position is a single (one, 1) amino acid selected from the following options: His Lys Ala
  MISC_FEATURE (103)..(103): Xaa at this position is a single (one, 1) amino acid selected from the following options: His Ala
  MISC_FEATURE (104)..(104): Xaa at this position is a single (one, 1) amino acid selected from the following options: His Ala
  MISC_FEATURE (124)..(124): Xaa at this position is a single (one, 1) amino acid selected from the following options: Met Gln Lys
  MISC_FEATURE (130)..(130): Asp or is absent (no amino acid at this position and so this position is not present)
  MISC_FEATURE (131)..(131): Asp or is absent (no amino acid at this position and so this position is not present)
  MISC_FEATURE (132)..(132): Asp or is absent (no amino acid at this position and so this position is not present)
HHHHHHDYKDDDDKXRRRRRRRXMAVTALAARTWLGVWGVRTMQARGFGFSSDKDHESSSGXIRDAGGAFGKRXQAEEERFFRQKTKEQLEALKKXXEDEIYXXKKAIEHMEKEIERHKQKIKXLKHDDXXX

SEQ ID NO: 282 - protein, 108 aa, Artificial Sequence
  Designed; as detailed elsewhere in present application
  MISC_FEATURE (15)..(15): Xaa at this position is a single (one, 1) amino acid (or lack thereof) selected from the following options: Gly Pro or is absent (no amino acid at this position and so this position is not present)
  MISC_FEATURE (23)..(23): Xaa at this position is a single (one, 1) amino acid (or lack thereof) selected from the following options: Gly Pro or is absent (no amino acid at this position and so this position is not present)
  MISC_FEATURE (62)..(62): Xaa at this position is a single (one, 1) amino acid selected from the following options: Ser Ala
  MISC_FEATURE (74)..(74): Xaa at this position is a single (one, 1) amino acid selected from the following options: Glu Gln Ala
  MISC_FEATURE (96)..(96): Xaa at this position is a single (one, 1) amino acid selected from the following options: His Tyr Ala
  MISC_FEATURE (97)..(97): Xaa at this position is a single (one, 1) amino acid selected from the following options: His Lys Ala
  MISC_FEATURE (103)..(103): Xaa at this position is a single (one, 1) amino acid selected from the following options: His Ala
  MISC_FEATURE (104)..(104): Xaa at this position is a single (one, 1) amino acid selected from the following options: His Ala
HHHHHHDYKDDDDKXRRRRRRRXMAVTALAARTWLGVWGVRTMQARGFGFSSDKDHESSSGXIRDAGGAFGKRXQAEEERFFRQKTKEQLEALKKXXEDEIYXXKKAI

SEQ ID NO: 283 - protein, 99 aa, Artificial Sequence
  Designed; as detailed elsewhere in present application
  MISC_FEATURE (15)..(15): Xaa at this position is a single (one, 1) amino acid (or lack thereof) selected from the following options: Gly Pro or is absent (no amino acid at this position and so this position is not present)
  MISC_FEATURE (23)..(23): Xaa at this position is a single (one, 1) amino acid (or lack thereof) selected from the following options: Gly Pro or is absent (no amino acid at this position and so this position is not present)
  MISC_FEATURE (53)..(53): Xaa at this position is a single (one, 1) amino acid selected from the following options: Ser Ala
  MISC_FEATURE (65)..(65): Xaa at this position is a single (one, 1) amino acid selected from the following options: Glu Gln Ala
  MISC_FEATURE (87)..(87): Xaa at this position is a single (one, 1) amino acid selected from the following options: His Tyr Ala
  MISC_FEATURE (88)..(88): Xaa at this position is a single (one, 1) amino acid selected from the following options: His Lys Ala
  MISC_FEATURE (94)..(94): Xaa at this position is a single (one, 1) amino acid selected from the following options: His Ala
  MISC_FEATURE (95)..(95): Xaa at this position is a single (one, 1) amino acid selected from the following options: His Ala
HHHHHHDYKDDDDKXRRRRRRRXMAVTALAARTWLGVWGVRTMQARGFSSSGXIRDAGGAFGKRXQAEEERFFRQKTKEQLEALKKXXEDEIYXXKKAI

SEQ ID NO: 284 - protein, 95 aa, Artificial Sequence
  Designed; as detailed elsewhere in present application
  MISC_FEATURE (15)..(15): Xaa at this position is a single (one, 1) amino acid (or lack thereof) selected from the following options: Gly Pro or is absent (no amino acid at this position and so this position is not present)
  MISC_FEATURE (23)..(23): Xaa at this position is a single (one, 1) amino acid (or lack thereof) selected from the following options: Gly Pro or is absent (no amino acid at this position and so this position is not present)
  MISC_FEATURE (49)..(49): Xaa at this position is a single (one, 1) amino acid selected from the following options: Ser Ala
  MISC_FEATURE (61)..(61): Xaa at this position is a single (one, 1) amino acid selected from the following options: Glu Gln Ala
  MISC_FEATURE (83)..(83): Xaa at this position is a single (one, 1) amino acid selected from the following options: His Tyr Ala
  MISC_FEATURE (84)..(84): Xaa at this position is a single (one, 1) amino acid selected from the following options: His Lys Ala
  MISC_FEATURE (90)..(90): Xaa at this position is a single (one, 1) amino acid selected from the following options: His Ala
  MISC_FEATURE (91)..(91): Xaa at this position is a single (one, 1) amino acid selected from the following options: His Ala
HHHHHHDYKDDDDKXRRRRRRRXMAVTALAARTWLGVWGVRTMQARGFXIRDAGGAFGKRXQAEEERFFRQKTKEQLEALKKXXEDEIYXXKKAI

SEQ ID NO: 285 - protein, 83 aa, Artificial Sequence
  Designed; as detailed elsewhere in present application
  MISC_FEATURE (15)..(15): Xaa at this position is a single (one, 1) amino acid (or lack thereof) selected from the following options: Gly Pro or is absent (no amino acid at this position and so this position is not present)
  MISC_FEATURE (23)..(23): Xaa at this position is a single (one, 1) amino acid (or lack thereof) selected from the following options: Gly Pro or is absent (no amino acid at this position and so this position is not present)
  MISC_FEATURE (50)..(50): Xaa at this position is a single (one, 1) amino acid selected from the following options: Ser Ala
  MISC_FEATURE (62)..(62): Xaa at this position is a single (one, 1) amino acid selected from the following options: Glu Gln Ala
HHHHHHDYKDDDDKXRRRRRRRXMAVTALAARTWLGVWGVRTMQARGFGXIRDAGGAFGKRXQAEEERFFRQKTKEQLEALKK

SEQ ID NO: 286 - protein, 82 aa, Artificial Sequence
  Designed; as detailed elsewhere in present application
  MISC_FEATURE (15)..(15): Xaa at this position is a single (one, 1) amino acid (or lack thereof) selected from the following options: Gly Pro or is absent (no amino acid at this position and so this position is not present)
  MISC_FEATURE (23)..(23): Xaa at this position is a single (one, 1) amino acid (or lack thereof) selected from the following options: Gly Pro or is absent (no amino acid at this position and so this position is not present)
  MISC_FEATURE (49)..(49): Xaa at this position is a single (one, 1) amino acid selected from the following options: Ser Ala
  MISC_FEATURE (61)..(61): Xaa at this position is a single (one, 1) amino acid selected from the following options: Glu Gln Ala
HHHHHHDYKDDDDKXRRRRRRRXMAVTALAARTWLGVWGVRTMQARGFXIRDAGGAFGKRXQAEEERFFRQKTKEQLEALKK

SEQ ID NO: 287 - protein, 65 aa, Artificial Sequence
  Designed; as detailed elsewhere in present application
  MISC_FEATURE (15)..(15): Xaa at this position is a single (one, 1) amino acid (or lack thereof) selected from the following options: Gly Pro or is absent (no amino acid at this position and so this position is not present)
  MISC_FEATURE (23)..(23): Xaa at this position is a single (one, 1) amino acid (or lack thereof) selected from the following options: Gly Pro or is absent (no amino acid at this position and so this position is not present)
HHHHHHDYKDDDDKXRRRRRRRXMAVTALAARTWLGVWGVRTMQARGFLEALKKHHEDEIYHHKK

SEQ ID NO: 288 - protein, 132 aa, Artificial Sequence
  Designed; as detailed elsewhere in present application
  MISC_FEATURE (15)..(15): Xaa at this position is a single (one, 1) amino acid (or lack thereof) selected from the following options: Gly Pro or is absent (no amino acid at this position and so this position is not present)
  MISC_FEATURE (23)..(23): Xaa at this position is a single (one, 1) amino acid (or lack thereof) selected from the following options: Gly Pro or is absent (no amino acid at this position and so this position is not present)
  MISC_FEATURE (74)..(74): Xaa at this position is a single (one, 1) amino acid selected from the following options: Glu Gln Ala
  MISC_FEATURE (96)..(96): Xaa at this position is a single (one, 1) amino acid selected from the following options: His Tyr Ala
  MISC_FEATURE (97)..(97): Xaa at this position is a single (one, 1) amino acid selected from the following options: His Lys Ala
  MISC_FEATURE (103)..(103): Xaa at this position is a single (one, 1) amino acid selected from the following options: His Ala
  MISC_FEATURE (104)..(104): Xaa at this position is a single (one, 1) amino acid selected from the following options: His Ala Thr Ser
  MISC_FEATURE (130)..(130): Asp or is absent (no amino acid at this position and so this position is not present)
  MISC_FEATURE (131)..(131): Asp or is absent (no amino acid at this position and so this position is not present)
  MISC_FEATURE (132)..(132): Asp or is absent (no amino acid at this position and so this position is not present)
HHHHHHDYKDDDDKXRRRRRRRXMAVTALAARTWLGVWGVRTMQARGFSSDQPHDLDRGAGAIREAGGAFAKRXAAEEERYFRAQAKEQLAALKKXXEEEITXXKKEIERLQNEIERHKQKIKKLKHDDXXX

SEQ ID NO: 289 - protein, 108 aa, Artificial Sequence
  Designed; as detailed elsewhere in present application
  MISC_FEATURE (15)..(15): Xaa at this position is a single (one, 1) amino acid (or lack thereof) selected from the following options: Gly Pro or is absent (no amino acid at this position and so this position is not present)
  MISC_FEATURE (23)..(23): Xaa at this position is a single (one, 1) amino acid (or lack thereof) selected from the following options: Gly Pro or is absent (no amino acid at this position and so this position is not present)
  MISC_FEATURE (74)..(74): Xaa at this position is a single (one, 1) amino acid selected from the following options: Glu Gln Ala
  MISC_FEATURE (96)..(96): Xaa at this position is a single (one, 1) amino acid selected from the following options: His Tyr Ala
  MISC_FEATURE (97)..(97): Xaa at this position is a single (one, 1) amino acid selected from the following options: His Lys Ala
  MISC_FEATURE (103)..(103): Xaa at this position is a single (one, 1) amino acid selected from the following options: His Ala
  MISC_FEATURE (104)..(104): Xaa at this position is a single (one, 1) amino acid selected from the following options: His Ala Thr Ser
HHHHHHDYKDDDDKXRRRRRRRXMAVTALAARTWLGVWGVRTMQARGFSSDQPHDLDRGAGAIREAGGAFAKRXAAEEERYFRAQAKEQLAALKKXXEEEITXXKKEI

SEQ ID NO: 290 - protein, 99 aa, Artificial Sequence
  Designed; as detailed elsewhere in present application
  MISC_FEATURE (15)..(15): Xaa at this position is a single (one, 1) amino acid (or lack thereof) selected from the following options: Gly Pro or is absent (no amino acid at this position and so this position is not present)
  MISC_FEATURE (23)..(23): Xaa at this position is a single (one, 1) amino acid (or lack thereof) selected from the following options: Gly Pro or is absent (no amino acid at this position and so this position is not present)
  MISC_FEATURE (65)..(65): Xaa at this position is a single (one, 1) amino acid selected from the following options: Glu Gln Ala
  MISC_FEATURE (87)..(87): Xaa at this position is a single (one, 1) amino acid selected from the following options: His Tyr Ala
  MISC_FEATURE (88)..(88): Xaa at this position is a single (one, 1) amino acid selected from the following options: His Lys Ala
  MISC_FEATURE (94)..(94): Xaa at this position is a single (one, 1) amino acid selected from the following options: His Ala
  MISC_FEATURE (95)..(95): Xaa at this position is a single (one, 1) amino acid selected from the following options: His Ala Thr Ser
HHHHHHDYKDDDDKXRRRRRRRXMAVTALAARTWLGVWGVRTMQARGFRGAGAIREAGGAFAKRXAAEEERYFRAQAKEQLAALKKXXEEEITXXKKEI

SEQ ID NO: 291 - protein, 95 aa, Artificial Sequence
  Designed; as detailed elsewhere in present application
  MISC_FEATURE (15)..(15): Xaa at this position is a single (one, 1) amino acid (or lack thereof) selected from the following options: Gly Pro or is absent (no amino acid at this position and so this position is not present)
  MISC_FEATURE (23)..(23): Xaa at this position is a single (one, 1) amino acid (or lack thereof) selected from the following options: Gly Pro or is absent (no amino acid at this position and so this position is not present)
  MISC_FEATURE (61)..(61): Xaa at this position is a single (one, 1) amino acid selected from the following options: Glu Gln Ala
  MISC_FEATURE (83)..(83): Xaa at this position is a single (one, 1) amino acid selected from the following options: His Tyr Ala
  MISC_FEATURE (84)..(84): Xaa at this position is a single (one, 1) amino acid selected from the following options: His Lys Ala
  MISC_FEATURE (90)..(90): Xaa at this position is a single (one, 1) amino acid selected from the following options: His Ala
  MISC_FEATURE (91)..(91): Xaa at this position is a single (one, 1) amino acid selected from the following options: His Ala Thr Ser
HHHHHHDYKDDDDKXRRRRRRRXMAVTALAARTWLGVWGVRTMQARGFAIREAGGAFAKRXAAEEERYFRAQAKEQLAALKKXXEEEITXXKKEI

SEQ ID NO: 292 - protein, 83 aa, Artificial Sequence
  Designed; as detailed elsewhere in present application
  MISC_FEATURE (15)..(15): Xaa at this position is a single (one, 1) amino acid (or lack thereof) selected from the following options: Gly Pro or is absent (no amino acid at this position and so this position is not present)
  MISC_FEATURE (23)..(23): Xaa at this position is a single (one, 1) amino acid (or lack thereof) selected from the following options: Gly Pro or is absent (no amino acid at this position and so this position is not present)
  MISC_FEATURE (62)..(62): Xaa at this position is a single (one, 1) amino acid selected from the following options: Glu Gln Ala
HHHHHHDYKDDDDKXRRRRRRRXMAVTALAARTWLGVWGVRTMQARGFGAIREAGGAFAKRXAAEEERYFRAQAKEQLAALKK

SEQ ID NO: 293 - protein, 82 aa, Artificial Sequence
  Designed; as detailed elsewhere in present application
  MISC_FEATURE (15)..(15): Xaa at this position is a single (one, 1) amino acid (or lack thereof) selected from the following options: Gly Pro or is absent (no amino acid at this position and so this position is not present)
  MISC_FEATURE (23)..(23): Xaa at this position is a single (one, 1) amino acid (or lack thereof) selected from the following options: Gly Pro or is absent (no amino acid at this position and so this position is not present)
  MISC_FEATURE (61)..(61): Xaa at this position is a single (one, 1) amino acid selected from the following options: Glu Gln Ala
HHHHHHDYKDDDDKXRRRRRRRXMAVTALAARTWLGVWGVRTMQARGFAIREAGGAFAKRXAAEEERYFRAQAKEQLAALKK

SEQ ID NO: 294 - protein, 65 aa, Artificial Sequence
  Designed; as detailed elsewhere in present application
  MISC_FEATURE (15)..(15): Xaa at this position is a single (one, 1) amino acid (or lack thereof) selected from the following options: Gly Pro or is absent (no amino acid at this position and so this position is not present)
  MISC_FEATURE (23)..(23): Xaa at this position is a single (one, 1) amino acid (or lack thereof) selected from the following options: Gly Pro or is absent (no amino acid at this position and so this position is not present)
HHHHHHDYKDDDDKXRRRRRRRXMAVTALAARTWLGVWGVRTMQARGFLAALKKYHEEEITHTKK

SEQ ID NO: 295 - protein, 132 aa, Artificial Sequence
  Designed; as detailed elsewhere in present application
  MISC_FEATURE (15)..(15): Xaa at this position is a single (one, 1) amino acid (or lack thereof) selected from the following options: Gly Pro or is absent (no amino acid at this position and so this position is not present)
  MISC_FEATURE (23)..(23): Xaa at this position is a single (one, 1) amino acid (or lack thereof) selected from the following options: Gly Pro or is absent (no amino acid at this position and so this position is not present)
  MISC_FEATURE (62)..(62): Xaa at this position is a single (one, 1) amino acid selected from the following options: Ser Ala
  MISC_FEATURE (74)..(74): Xaa at this position is a single (one, 1) amino acid selected from the following options: Glu Gln Ala
  MISC_FEATURE (96)..(96): Xaa at this position is a single (one, 1) amino acid selected from the following options: His Tyr Ala
  MISC_FEATURE (97)..(97): Xaa at this position is a single (one, 1) amino acid selected from the following options: His Lys Ala
  MISC_FEATURE (103)..(103): Xaa at this position is a single (one, 1) amino acid selected from the following options: His Ala
  MISC_FEATURE (104)..(104): Xaa at this position is a single (one, 1) amino acid selected from the following options: His Ala Thr Ser
  MISC_FEATURE (130)..(130): Asp or is absent (no amino acid at this position and so this position is not present)
  MISC_FEATURE (131)..(131): Asp or is absent (no amino acid at this position and so this position is not present)
  MISC_FEATURE (132)..(132): Asp or is absent (no amino acid at this position and so this position is not present)
HHHHHHDYKDDDDKXRRRRRRRXMAVTALAARTWLGVWGVRTMQARGFSSDQSEDLDRRAGXIREAGGAFAKRXAAEEERYFRAQAKEQLAALKKXXEEEIVXXKKEIERLQKEIERHKQKIKKLKHDDXXX

SEQ ID NO: 296 - protein, 108 aa, Artificial Sequence
  Designed; as detailed elsewhere in present application
  MISC_FEATURE (15)..(15): Xaa at this position is a single (one, 1) amino acid (or lack thereof) selected from the following options: Gly Pro or is absent (no amino acid at this position and so this position is not present)
  MISC_FEATURE (23)..(23): Xaa at this position is a single (one, 1) amino acid (or lack thereof) selected from the following options: Gly Pro or is absent (no amino acid at this position and so this position is not present)
  MISC_FEATURE (62)..(62): Xaa at this position is a single (one, 1) amino acid selected from the following options: Ser Ala
  MISC_FEATURE (74)..(74): Xaa at this position is a single (one, 1) amino acid selected from the following options: Glu Gln Ala
  MISC_FEATURE (96)..(96): Xaa at this position is a single (one, 1) amino acid selected from the following options: His Tyr Ala
  MISC_FEATURE (97)..(97): Xaa at this position is a single (one, 1) amino acid selected from the following options: His Lys Ala
  MISC_FEATURE (103)..(103): Xaa at this position is a single (one, 1) amino acid selected from the following options: His Ala
  MISC_FEATURE (104)..(104): Xaa at this position is a single (one, 1) amino acid selected from the following options: His Ala Thr Ser
HHHHHHDYKDDDDKXRRRRRRRXMAVTALAARTWLGVWGVRTMQARGFSSDQSEDLDRRAGXIREAGGAFAKRXAAEEERYFRAQAKEQLAALKKXXEEEIVXXKKEI

SEQ ID NO: 297 - protein, 99 aa, Artificial Sequence
  Designed; as detailed elsewhere in present application
  MISC_FEATURE (15)..(15): Xaa at this position is a single (one, 1) amino acid (or lack thereof) selected from the following options: Gly Pro or is absent (no amino acid at this position and so this position is not present)
  MISC_FEATURE (23)..(23): Xaa at this position is a single (one, 1) amino acid (or lack thereof) selected from the following options: Gly Pro or is absent (no amino acid at this position and so this position is not present)
  MISC_FEATURE (53)..(53): Xaa at this position is a single (one, 1) amino acid selected from the following options: Ser Ala
  MISC_FEATURE (65)..(65): Xaa at this position is a single (one, 1) amino acid selected from the following options: Glu Gln Ala
  MISC_FEATURE (87)..(87): Xaa at this position is a single (one, 1) amino acid selected from the following options: His Tyr Ala
  MISC_FEATURE (88)..(88): Xaa at this position is a single (one, 1) amino acid selected from the following options: His Lys Ala
  MISC_FEATURE (94)..(94): Xaa at this position is a single (one, 1) amino acid selected from the following options: His Ala
  MISC_FEATURE (95)..(95): Xaa at this position is a single (one, 1) amino acid selected from the following options: His Ala Thr Ser
HHHHHHDYKDDDDKXRRRRRRRXMAVTALAARTWLGVWGVRTMQARGFRRAGXIREAGGAFAKRXAAEEERYFRAQAKEQLAALKKXXEEEIVXXKKEI

SEQ ID NO: 298 - protein, 95 aa, Artificial Sequence
  Designed; as detailed elsewhere in present application
  MISC_FEATURE (15)..(15): Xaa at this position is a single (one, 1) amino acid (or lack thereof) selected from the following options: Gly Pro or is absent (no amino acid at this position and so this position is not present)
  MISC_FEATURE (23)..(23): Xaa at this position is a single (one, 1) amino acid (or lack thereof) selected from the following options: Gly Pro or is absent (no amino acid at this position and so this position is not present)
  MISC_FEATURE (49)..(49): Xaa at this position is a single (one, 1) amino acid selected from the following options: Ser Ala
  MISC_FEATURE (61)..(61): Xaa at this position is a single (one, 1) amino acid selected from the following options: Glu Gln Ala
  MISC_FEATURE (83)..(83): Xaa at this position is a single (one, 1) amino acid selected from the following options: His Tyr Ala
  MISC_FEATURE (84)..(84): Xaa at this position is a single (one, 1) amino acid selected from the following options: His Lys Ala
  MISC_FEATURE (90)..(90): Xaa at this position is a single (one, 1) amino acid selected from the following options: His Ala
  MISC_FEATURE (91)..(91): Xaa at this position is a single (one, 1) amino acid selected from the following options: His Ala Thr Ser
HHHHHHDYKDDDDKXRRRRRRRXMAVTALAARTWLGVWGVRTMQARGFXIREAGGAFAKRXAAEEERYFRAQAKEQLAALKKXXEEEIVXXKKEI

SEQ ID NO: 299 - protein, 83 aa, Artificial Sequence
  Designed; as detailed elsewhere in present application
  MISC_FEATURE (15)..(15): Xaa at this position is a single (one, 1) amino acid (or lack thereof) selected from the following options: Gly Pro or is absent (no amino acid at this position and so this position is not present)
  MISC_FEATURE (23)..(23): Xaa at this position is a single (one, 1) amino acid (or lack thereof) selected from the following options: Gly Pro or is absent (no amino acid at this position and so this position is not present)
  MISC_FEATURE (50)..(50): Xaa at this position is a single (one, 1) amino acid selected from the following options: Ser Ala
  MISC_FEATURE (62)..(62): Xaa at this position is a single (one, 1) amino acid selected from the following options: Glu Gln Ala
HHHHHHDYKDDDDKXRRRRRRRXMAVTALAARTWLGVWGVRTMQARGFGXIREAGGAFAKRXAAEEERYFRAQAKEQLAALKK

SEQ ID NO: 300 - protein, 82 aa, Artificial Sequence
  Designed; as detailed elsewhere in present application
  MISC_FEATURE (15)..(15): Xaa at this position is a single (one, 1) amino acid (or lack thereof) selected from the following options: Gly Pro or is absent (no amino acid at this position and so this position is not present)
  MISC_FEATURE (23)..(23): Xaa at this position is a single (one, 1) amino acid (or lack thereof) selected from the following options: Gly Pro or is absent (no amino acid at this position and so this position is not present)
  MISC_FEATURE (49)..(49): Xaa at this position is a single (one, 1) amino acid selected from the following options: Ser Ala
  MISC_FEATURE (61)..(61): Xaa at this position is a single (one, 1) amino acid selected from the following options: Glu Gln Ala
HHHHHHDYKDDDDKXRRRRRRRXMAVTALAARTWLGVWGVRTMQARGFXIREAGGAFAKRXAAEEERYFRAQAKEQLAALKK

SEQ ID NO: 301 - protein, 65 aa, Artificial Sequence
  Designed; as detailed elsewhere in present application
  MISC_FEATURE (15)..(15): Xaa at this position is a single (one, 1) amino acid (or lack thereof) selected from the following options: Gly Pro or is absent (no amino acid at this position and so this position is not present)
  MISC_FEATURE (23)..(23): Xaa at this position is a single (one, 1) amino acid (or lack thereof) selected from the following options: Gly Pro or is absent (no amino acid at this position and so this position is not present)
HHHHHHDYKDDDDKXRRRRRRRXMAVTALAARTWLGVWGVRTMQARGFLAALKKYHEEEIVHSKK

SEQ ID NO: 302 - protein, 132 aa, Artificial Sequence
  Designed; as detailed elsewhere in present application
  MISC_FEATURE (15)..(15): Xaa at this position is a single (one, 1) amino acid (or lack thereof) selected from the following options: Gly Pro or is absent (no amino acid at this position and so this position is not present)
  MISC_FEATURE (23)..(23): Xaa at this position is a single (one, 1) amino acid (or lack thereof) selected from the following options: Gly Pro or is absent (no amino acid at this position and so this position is not present)
  MISC_FEATURE (74)..(74): Xaa at this position is a single (one, 1) amino acid selected from the following options: Glu Gln Ala
  MISC_FEATURE (96)..(96): Xaa at this position is a single (one, 1) amino acid selected from the following options: His Tyr Ala
  MISC_FEATURE (97)..(97): Xaa at this position is a single (one, 1) amino acid selected from the following options: His Lys Ala
  MISC_FEATURE (103)..(103): Xaa at this position is a single (one, 1) amino acid selected from the following options: His Ala
  MISC_FEATURE (104)..(104): Xaa at this position is a single (one, 1) amino acid selected from the following options: His Ala
HHHHHHDYKDDDDKXRRRRRRRXMAGSALAVRARFGVWGMKVLQTRGFGSESGDNVRSSAGAVRDAGGAFGKRXQAEEERYFRARAKEQLAALKKXXENEISXXAKEIERLQKEIERHKQSIKKLKQSEDDD

SEQ ID NO: 303 - protein, 108 aa, Artificial Sequence
  Designed; as detailed elsewhere in present application
  MISC_FEATURE (15)..(15): Xaa at this position is a single (one, 1) amino acid (or lack thereof) selected from the following options: Gly Pro or is absent (no amino acid at this position and so this position is not present)
  MISC_FEATURE (23)..(23): Xaa at this position is a single (one, 1) amino acid (or lack thereof) selected from the following options: Gly Pro or is absent (no amino acid at this position and so this position is not present)
  MISC_FEATURE (74)..(74): Xaa at this position is a single (one, 1) amino acid selected from the following options: Glu Gln Ala
  MISC_FEATURE (96)..(96): Xaa at this position is a single (one, 1) amino acid selected from the following options: His Tyr Ala
  MISC_FEATURE (97)..(97): Xaa at this position is a single (one, 1) amino acid selected from the following options: His Lys Ala
  MISC_FEATURE (103)..(103): Xaa at this position is a single (one, 1) amino acid selected from the following options: His Ala
  MISC_FEATURE (104)..(104): Xaa at this position is a single (one, 1) amino acid selected from the following options: His Ala
HHHHHHDYKDDDDKXRRRRRRRXMAGSALAVRARFGVWGMKVLQTRGFGSESGDNVRSSAGAVRDAGGAFGKRXQAEEERYFRARAKEQLAALKKXXENEISXXAKEI

SEQ ID NO: 304 - protein, 99 aa, Artificial Sequence
  Designed; as detailed elsewhere in present application
  MISC_FEATURE (15)..(15): Xaa at this position is a single (one, 1) amino acid (or lack thereof) selected from the following options: Gly Pro or is absent (no amino acid at this position and so this position is not present)
  MISC_FEATURE (23)..(23): Xaa at this position is a single (one, 1) amino acid (or lack thereof) selected from the following options: Gly Pro or is absent (no amino acid at this position and so this position is not present)
  MISC_FEATURE (65)..(65): Xaa at this position is a single (one, 1) amino acid selected from the following options: Glu Gln Ala
  MISC_FEATURE (87)..(87): Xaa at this position is a single (one, 1) amino acid selected from the following options: His Tyr Ala
  MISC_FEATURE (88)..(88): Xaa at this position is a single (one, 1) amino acid selected from the following options: His Lys Ala
  MISC_FEATURE (94)..(94): Xaa at this position is a single (one, 1) amino acid selected from the following options: His Ala
  MISC_FEATURE (95)..(95): Xaa at this position is a single (one, 1) amino acid selected from the following options: His Ala
HHHHHHDYKDDDDKXRRRRRRRXMAGSALAVRARFGVWGMKVLQTRGFSSAGAVRDAGGAFGKRXQAEEERYFRARAKEQLAALKKXXENEISXXAKEI

SEQ ID NO: 305 - protein, 95 aa, Artificial Sequence
  Designed; as detailed elsewhere in present application
  MISC_FEATURE (15)..(15): Xaa at this position is a single (one, 1) amino acid (or lack thereof) selected from the following options: Gly Pro or is absent (no amino acid at this position and so this position is not present)
  MISC_FEATURE (23)..(23): Xaa at this position is a single (one, 1) amino acid (or lack thereof) selected from the following options: Gly Pro or is absent (no amino acid at this position and so this position is not present)
  MISC_FEATURE (61)..(61): Xaa at this position is a single (one, 1) amino acid selected from the following options: Glu Gln Ala
  MISC_FEATURE (83)..(83): Xaa at this position is a single (one, 1) amino acid selected from the following options: His Tyr Ala
  MISC_FEATURE (84)..(84): Xaa at this position is a single (one, 1) amino acid selected from the following options: His Lys Ala
  MISC_FEATURE (90)..(90): Xaa at this position is a single (one, 1) amino acid selected from the following options: His Ala
  MISC_FEATURE (91)..(91): Xaa at this position is a single (one, 1) amino acid selected from the following options: His Ala
HHHHHHDYKDDDDKXRRRRRRRXMAGSALAVRARFGVWGMKVLQTRGFAVRDAGGAFGKRXQAEEERYFRARAKEQLAALKKXXENEISXXAKEI

SEQ ID NO: 306 - protein, 83 aa, Artificial Sequence
  Designed; as detailed elsewhere in present application
  MISC_FEATURE (15)..(15): Xaa at this position is a single (one, 1) amino acid (or lack thereof) selected from the following options: Gly Pro or is absent (no amino acid at this position and so this position is not present)
  MISC_FEATURE (23)..(23): Xaa at this position is a single (one, 1) amino acid (or lack thereof) selected from the following options: Gly Pro or is absent (no amino acid at this position and so this position is not present)
  MISC_FEATURE (62)..(62): Xaa at this position is a single (one, 1) amino acid selected from the following options: Glu Gln Ala
HHHHHHDYKDDDDKXRRRRRRRXMAGSALAVRARFGVWGMKVLQTRGFGAVRDAGGAFGKRXQAEEERYFRARAKEQLAALKK

SEQ ID NO: 307 - protein, 82 aa, Artificial Sequence
  Designed; as detailed elsewhere in present application
  MISC_FEATURE (15)..(15): Xaa at this position is a single (one, 1) amino acid (or lack thereof) selected from the following options: Gly Pro or is absent (no amino acid at this position and so this position is not present)
  MISC_FEATURE (23)..(23): Xaa at this position is a single (one, 1) amino acid (or lack thereof) selected from the following options: Gly Pro or is absent (no amino acid at this position and so this position is not present)
  MISC_FEATURE (61)..(61): Xaa at this position is a single (one, 1) amino acid selected from the following options: Glu Gln Ala
HHHHHHDYKDDDDKXRRRRRRRXMAGSALAVRARFGVWGMKVLQTRGFAVRDAGGAFGKRXQAEEERYFRARAKEQLAALKK

SEQ ID NO: 308 - protein, 65 aa, Artificial Sequence
  Designed; as detailed elsewhere in present application
  MISC_FEATURE (15)..(15): Xaa at this position is a single (one, 1) amino acid (or lack thereof) selected from the following options: Gly Pro or is absent (no amino acid at this position and so this position is not present)
  MISC_FEATURE (23)..(23): Xaa at this position is a single (one, 1) amino acid (or lack thereof) selected from the following options: Gly Pro or is absent (no amino acid at this position and so this position is not present)
HHHHHHDYKDDDDKXRRRRRRRXMAGSALAVRARFGVWGMKVLQTRGFLAALKKHHENEISHHAK

SEQ ID NO: 309 - protein, 132 aa, Artificial Sequence
  Designed; as detailed elsewhere in present application
  MISC_FEATURE (15)..(15): Xaa at this position is a single (one, 1) amino acid (or lack thereof) selected from the following options: Gly Pro or is absent (no amino acid at this position and so this position is not present)
  MISC_FEATURE (23)..(23): Xaa at this position is a single (one, 1) amino acid (or lack thereof) selected from the following options: Gly Pro or is absent (no amino acid at this position and so this position is not present)
  MISC_FEATURE (62)..(62): Xaa at this position is a single (one, 1) amino acid selected from the following options: Ser Ala
  MISC_FEATURE (74)..(74): Xaa at this position is a single (one, 1) amino acid selected from the following options: Glu Gln Ala
  MISC_FEATURE (96)..(96): Xaa at this position is a single (one, 1) amino acid selected from the following options: His Tyr Ala
  MISC_FEATURE (97)..(97): Xaa at this position is a single (one, 1) amino acid selected from the following options: His Lys Ala
  MISC_FEATURE (103)..(103): Xaa at this position is a single (one, 1) amino acid selected from the following options: His Ala
  MISC_FEATURE (104)..(104): Xaa at this position is a single (one, 1) amino acid selected from the following options: His Ala
  MISC_FEATURE (124)..(124): Xaa at this position is a single (one, 1) amino acid selected from the following options: Met Lys
  MISC_FEATURE (130)..(130): Asp or is absent (no amino acid at this position and so this position is not present)
  MISC_FEATURE (131)..(131): Asp or is absent (no amino acid at this position and so this position is not present)
  MISC_FEATURE (132)..(132): Asp or is absent (no amino acid at this position and so this position is not present)
HHHHHHDYKDDDDKXRRRRRRRXMAGSALAVRARFGVWGMKVLQTRGFGSDQSENVDRGAGXIREAGGAFGKRXQAEEERYFRAQSREQLAALKKXXEEEIVXXKKEIERLQKEIERHKQKIKXLKHDDXXX

SEQ ID NO: 310 - protein, 108 aa, Artificial Sequence
  Designed; as detailed elsewhere in present application
  MISC_FEATURE (15)..(15): Xaa at this position is a single (one, 1) amino acid (or lack thereof) selected from the following options: Gly Pro or is absent (no amino acid at this position and so this position is not present)
  MISC_FEATURE (23)..(23): Xaa at this position is a single (one, 1) amino acid (or lack thereof) selected from the following options: Gly Pro or is absent (no amino acid at this position and so this position is not present)
  MISC_FEATURE (62)..(62): Xaa at this position is a single (one, 1) amino acid selected from the following options: Ser Ala
  MISC_FEATURE (74)..(74): Xaa at this position is a single (one, 1) amino acid selected from the following options: Glu Gln Ala
  MISC_FEATURE (96)..(96): Xaa at this position is a single (one, 1) amino acid selected from the following options: His Tyr Ala
  MISC_FEATURE (97)..(97): Xaa at this position is a single (one, 1) amino acid selected from the following options: His Lys Ala
  MISC_FEATURE (103)..(103): Xaa at this position is a single (one, 1) amino acid selected from the following options: His Ala
  MISC_FEATURE (104)..(104): Xaa at this position is a single (one, 1) amino acid selected from the following options: His Ala
HHHHHHDYKDDDDKXRRRRRRRXMAGSALAVRARFGVWGMKVLQTRGFGSDQSENVDRGAGXIREAGGAFGKRXQAEEERYFRAQSREQLAALKKXXEEEIVXXKKEI

SEQ ID NO: 311 - protein, 99 aa, Artificial Sequence
  Designed; as detailed elsewhere in present application
  MISC_FEATURE (15)..(15): Xaa at this position is a single (one, 1) amino acid (or lack thereof) selected from the following options: Gly Pro or is absent (no amino acid at this position and so this position is not present)
  MISC_FEATURE (23)..(23): Xaa at this position is a single (one, 1) amino acid (or lack thereof) selected from the following options: Gly Pro or is absent (no amino acid at this position and so this position is not present)
  MISC_FEATURE (53)..(53): Xaa at this position is a single (one, 1) amino acid selected from the following options: Ser Ala
  MISC_FEATURE (65)..(65): Xaa at this position is a single (one, 1) amino acid selected from the following options: Glu Gln Ala
  MISC_FEATURE (87)..(87): Xaa at this position is a single (one, 1) amino acid selected from the following options: His Tyr Ala
  MISC_FEATURE (88)..(88): Xaa at this position is a single (one, 1) amino acid selected from the following options: His Lys Ala
  MISC_FEATURE (94)..(94): Xaa at this position is a single (one, 1) amino acid selected from the following options: His Ala
  MISC_FEATURE (95)..(95): Xaa at this position is a single (one, 1) amino acid selected from the following options: His Ala
HHHHHHDYKDDDDKXRRRRRRRXMAGSALAVRARFGVWGMKVLQTRGFRGAGXIREAGGAFGKRXQAEEERYFRAQSREQLAALKKXXEEEIVXXKKEI

SEQ ID NO: 312 - protein, 95 aa, Artificial Sequence
  Designed; as detailed elsewhere in present application
  MISC_FEATURE (15)..(15): Xaa at this position is a single (one, 1) amino acid (or lack thereof) selected from the following options: Gly Pro or is absent (no amino acid at this position and so this position is not present)
  MISC_FEATURE (23)..(23): Xaa at this position is a single (one, 1) amino acid (or lack thereof) selected from the following options: Gly Pro or is absent (no amino acid at this position and so this position is not present)
  MISC_FEATURE (49)..(49): Xaa at this position is a single (one, 1) amino acid selected from the following options: Ser Ala
  MISC_FEATURE (61)..(61): Xaa at this position is a single (one, 1) amino acid selected from the following options: Glu Gln Ala
  MISC_FEATURE (83)..(83): Xaa at this position is a single (one, 1) amino acid selected from the following options: His Tyr Ala
  MISC_FEATURE (84)..(84): Xaa at this position is a single (one, 1) amino acid selected from the following options: His Lys Ala
  MISC_FEATURE (90)..(90): Xaa at this position is a single (one, 1) amino acid selected from the following options: His Ala
  MISC_FEATURE (91)..(91): Xaa at this position is a single (one, 1) amino acid selected from the following options: His Ala
HHHHHHDYKDDDDKXRRRRRRRXMAGSALAVRARFGVWGMKVLQTRGFXIREAGGAFGKRXQAEEERYFRAQSREQLAALKKXXEEEIVXXKKEI

SEQ ID NO: 313 - protein, 83 aa, Artificial Sequence
  Designed; as detailed elsewhere in present application
  MISC_FEATURE (15)..(15): Xaa at this position is a single (one, 1) amino acid (or lack thereof) selected from the following options: Gly Pro or is absent (no amino acid at this position and so this position is not present)
  MISC_FEATURE (23)..(23): Xaa at this position is a single (one, 1) amino acid (or lack thereof) selected from the following options: Gly Pro or is absent (no amino acid at this position and so this position is not present)
  MISC_FEATURE (50)..(50): Xaa at this position is a single (one, 1) amino acid selected from the following options: Ser Ala
  MISC_FEATURE (62)..(62): Xaa at this position is a single (one, 1) amino acid selected from the following options: Glu Gln Ala
HHHHHHDYKDDDDKXRRRRRRRXMAGSALAVRARFGVWGMKVLQTRGFGXIREAGGAFGKRXQAEEERYFRAQSREQLAALKK

SEQ ID NO: 314 - protein, 82 aa, Artificial Sequence
  Designed; as detailed elsewhere in present application
  MISC_FEATURE (15)..(15): Xaa at this position is a single (one, 1) amino acid (or lack thereof) selected from the following options: Gly Pro or is absent (no amino acid at this position and so this position is not present)
  MISC_FEATURE (23)..(23): Xaa at this position is a single (one, 1) amino acid (or lack thereof) selected from the following options: Gly Pro or is absent (no amino acid at this position and so this position is not present)
  MISC_FEATURE (49)..(49): Xaa at this position is a single (one, 1) amino acid selected from the following options: Ser Ala
  MISC_FEATURE (61)..(61): Xaa at this position is a single (one, 1) amino acid selected from the following options: Glu Gln Ala
HHHHHHDYKDDDDKXRRRRRRRXMAGSALAVRARFGVWGMKVLQTRGFXIREAGGAFGKRXQAEEERYFRAQSREQLAALKK

SEQ ID NO: 315 - protein, 65 aa, Artificial Sequence
  Designed; as detailed elsewhere in present application
  MISC_FEATURE (15)..(15): Xaa at this position is a single (one, 1) amino acid (or lack thereof) selected from the following options: Gly Pro or is absent (no amino acid at this position and so this position is not present)
  MISC_FEATURE (23)..(23): Xaa at this position is a single (one, 1) amino acid (or lack thereof) selected from the following options: Gly Pro or is absent (no amino acid at this position and so this position is not present)
HHHHHHDYKDDDDKXRRRRRRRXMAGSALAVRARFGVWGMKVLQTRGFLAALKKHHEEEIVHHKK

SEQ ID NO: 316 - protein, 132 aa, Artificial Sequence
  Designed; as detailed elsewhere in present application
  MISC_FEATURE (15)..(15): Xaa at this position is a single (one, 1) amino acid (or lack thereof) selected from the following options: Gly Pro or is absent (no amino acid at this position and so this position is not present)
  MISC_FEATURE (23)..(23): Xaa at this position is a single (one, 1) amino acid (or lack thereof) selected from the following options: Gly Pro or is absent (no amino acid at this position and so this position is not present)
  MISC_FEATURE (74)..(74): Xaa at this position is a single (one, 1) amino acid selected from the following options: Glu Gln Ala
  MISC_FEATURE (96)..(96): Xaa at this position is a single (one, 1) amino acid selected from the following options: His Tyr Ala
  MISC_FEATURE (97)..(97): Xaa at this position is a single (one, 1) amino acid selected from the following options: His Lys Ala
  MISC_FEATURE (103)..(103): Xaa at this position is a single (one, 1) amino acid selected from the following options: His Ala
  MISC_FEATURE (104)..(104): Xaa at this position is a single (one, 1) amino acid selected from the following options: His Ala
  MISC_FEATURE (131)..(131): Asp or is absent (no amino acid at this position and so this position is not present)
  MISC_FEATURE (132)..(132): Asp or is absent (no amino acid at this position and so this position is not present)
HHHHHHDYKDDDDKXRRRRRRRXMAGSALAVRARFGVWGMKVLQTRGFGSESADNLGSSAGAIRDAGGAFGKKXQAEEERYFRARAKEQLAALKKXXENEISXXVKEIEHLQKEIERHKQSIKKLKHDDDXX

SEQ ID NO: 317 - protein, 108 aa, Artificial Sequence
  Designed; as detailed elsewhere in present application
  MISC_FEATURE (15)..(15): Xaa at this position is a single (one, 1) amino acid (or lack thereof) selected from the following options: Gly Pro or is absent (no amino acid at this position and so this position is not present)
  MISC_FEATURE (23)..(23): Xaa at this position is a single (one, 1) amino acid (or lack thereof) selected from the following options: Gly Pro or is absent (no amino acid at this position and so this position is not present)
  MISC_FEATURE (74)..(74): Xaa at this position is a single (one, 1) amino acid selected from the following options: Glu Gln Ala
  MISC_FEATURE (96)..(96): Xaa at this position is a single (one, 1) amino acid selected from the following options: His Tyr Ala
  MISC_FEATURE (97)..(97): Xaa at this position is a single (one, 1) amino acid selected from the following options: His Lys Ala
  MISC_FEATURE (103)..(103): Xaa at this position is a single (one, 1) amino acid selected from the following options: His Ala
  MISC_FEATURE (104)..(104): Xaa at this position is a single (one, 1) amino acid selected from the following options: His Ala
HHHHHHDYKDDDDKXRRRRRRRXMAGSALAVRARFGVWGMKVLQTRGFGSESADNLGSSAGAIRDAGGAFGKKXQAEEERYFRARAKEQLAALKKXXENEISXXVKEI

SEQ ID NO: 318 - protein, 99 aa, Artificial Sequence
  Designed; as detailed elsewhere in present application
  MISC_FEATURE (15)..(15): Xaa at this position is a single (one, 1) amino acid (or lack thereof) selected from the following options: Gly Pro or is absent (no amino acid at this position and so this position is not present)
  MISC_FEATURE (23)..(23): Xaa at this position is a single (one, 1) amino acid (or lack thereof) selected from the following options: Gly Pro or is absent (no amino acid at this position and so this position is not present)
  MISC_FEATURE (65)..(65): Xaa at this position is a single (one, 1) amino acid selected from the following options: Glu Gln Ala
  MISC_FEATURE (87)..(87): Xaa at this position is a single (one, 1) amino acid selected from the following options: His Tyr Ala
  MISC_FEATURE (88)..(88): Xaa at this position is a single (one, 1) amino acid selected from the following options: His Lys Ala
  MISC_FEATURE (94)..(94): Xaa at this position is a single (one, 1) amino acid selected from the following options: His Ala
  MISC_FEATURE (95)..(95): Xaa at this position is a single (one, 1) amino acid selected from the following options: His Ala
HHHHHHDYKDDDDKXRRRRRRRXMAGSALAVRARFGVWGMKVLQTRGFSSAGAIRDAGGAFGKKXQAEEERYFRARAKEQLAALKKXXENEISXXVKEI

SEQ ID NO: 319 - protein, 95 aa, Artificial Sequence
  Designed; as detailed elsewhere in present application
  MISC_FEATURE (15)..(15): Xaa at this position is a single (one, 1) amino acid (or lack thereof) selected from the following options: Gly Pro or is absent (no amino acid at this position and so this position is not present)
  MISC_FEATURE (23)..(23): Xaa at this position is a single (one, 1) amino acid (or lack thereof) selected from the following options: Gly Pro or is absent (no amino acid at this position and so this position is not present)
  MISC_FEATURE (61)..(61): Xaa at this position is a single (one, 1) amino acid selected from the following options: Glu Gln Ala
  MISC_FEATURE (83)..(83): Xaa at this position is a single (one, 1) amino acid selected from the following options: His Tyr Ala
  MISC_FEATURE (84)..(84): Xaa at this position is a single (one, 1) amino acid selected from the following options: His Lys Ala
  MISC_FEATURE (90)..(90): Xaa at this position is a single (one, 1) amino acid selected from the following options: His Ala
  MISC_FEATURE (91)..(91): Xaa at this position is a single (one, 1) amino acid selected from the following options: His Ala
HHHHHHDYKDDDDKXRRRRRRRXMAGSALAVRARFGVWGMKVLQTRGFAIRDAGGAFGKKXQAEEERYFRARAKEQLAALKKXXENEISXXVKEI

SEQ ID NO: 320 - protein, 83 aa, Artificial Sequence
  Designed; as detailed elsewhere in present application
  MISC_FEATURE (15)..(15): Xaa at this position is a single (one, 1) amino acid (or lack thereof) selected from the following options: Gly Pro or is absent (no amino acid at this position and so this position is not present)
  MISC_FEATURE (23)..(23): Xaa at this position is a single (one, 1) amino acid (or lack thereof) selected from the following options: Gly Pro or is absent (no amino acid at this position and so this position is not present)
  MISC_FEATURE (62)..(62): Xaa at this position is a single (one, 1) amino acid selected from the following options: Glu Gln Ala
HHHHHHDYKDDDDKXRRRRRRRXMAGSALAVRARFGVWGMKVLQTRGFGAIRDAGGAFGKKXQAEEERYFRARAKEQLAALKK

SEQ ID NO: 321 - protein, 82 aa, Artificial Sequence
  Designed; as detailed elsewhere in present application
  MISC_FEATURE (15)..(15): Xaa at this position is a single (one, 1) amino acid (or lack thereof) selected from the following options: Gly Pro or is absent (no amino acid at this position and so this position is not present)
  MISC_FEATURE (23)..(23): Xaa at this position is a single (one, 1) amino acid (or lack thereof) selected from the following options: Gly Pro or is absent (no amino acid at this position and so this position is not present)
  MISC_FEATURE (61)..(61): Xaa at this position is a single (one, 1) amino acid selected from the following options: Glu Gln Ala
HHHHHHDYKDDDDKXRRRRRRRXMAGSALAVRARFGVWGMKVLQTRGFAIRDAGGAFGKKXQAEEERYFRARAKEQLAALKK

SEQ ID NO: 322 - protein, 65 aa, Artificial Sequence
  Designed; as detailed elsewhere in present application
  MISC_FEATURE (15)..(15): Xaa at this position is a single (one, 1) amino acid (or lack thereof) selected from the following options: Gly Pro or is absent (no amino acid at this position and so this position is not present)
  MISC_FEATURE (23)..(23): Xaa at this position is a single (one, 1) amino acid (or lack thereof) selected from the following options: Gly Pro or is absent (no amino acid at this position and so this position is not present)
HHHHHHDYKDDDDKXRRRRRRRXMAGSALAVRARFGVWGMKVLQTRGFLAALKKHHENEISHHVK

SEQ ID NO: 323 - protein, 132 aa, Artificial Sequence
  Designed; as detailed elsewhere in present application
  MISC_FEATURE (15)..(15): Xaa at this position is a single (one, 1) amino acid (or lack thereof) selected from the following options: Gly Pro or is absent (no amino acid at this position and so this position is not present)
  MISC_FEATURE (23)..(23): Xaa at this position is a single (one, 1) amino acid (or lack thereof) selected from the following options: Gly Pro or is absent (no amino acid at this position and so this position is not present)
  MISC_FEATURE (62)..(62): Xaa at this position is a single (one, 1) amino acid selected from the following options: Thr Ala
  MISC_FEATURE (74)..(74): Xaa at this position is a single (one, 1) amino acid selected from the following options: Glu Gln Ala
  MISC_FEATURE (96)..(96): Xaa at this position is a single (one, 1) amino acid selected from the following options: His Tyr Ala
  MISC_FEATURE (97)..(97): Xaa at this position is a single (one, 1) amino acid selected from the following options: His Lys Ala
  MISC_FEATURE (103)..(103): Xaa at this position is a single (one, 1) amino acid selected from the following options: His Ala
  MISC_FEATURE (104)..(104): Xaa at this position is a single (one, 1) amino acid selected from the following options: His Ala
  MISC_FEATURE (131)..(131): Asp or is absent (no amino acid at this position and so this position is not present)
  MISC_FEATURE (132)..(132): Asp or is absent (no amino acid at this position and so this position is not present)
HHHHHHDYKDDDDKXRRRRRRRXMAGSALAVRARFGVWGMKVLQTRGFGSEPADNLGSSEAXVWNAGVDFRKRXQAKGERYLRARAKEQLAALKKXXENEISXXVKEIEHLQKEIERHKQSIKKLKHDDDXX

SEQ ID NO: 324 - protein, 108 aa, Artificial Sequence
  Designed; as detailed elsewhere in present application
  MISC_FEATURE (15)..(15): Xaa at this position is a single (one, 1) amino acid (or lack thereof) selected from the following options: Gly Pro or is absent (no amino acid at this position and so this position is not present)
  MISC_FEATURE (23)..(23): Xaa at this position is a single (one, 1) amino acid (or lack thereof) selected from the following options: Gly Pro or is absent (no amino acid at this position and so this position is not present)
  MISC_FEATURE (62)..(62): Xaa at this position is a single (one, 1) amino acid selected from the following options: Thr Ala
  MISC_FEATURE (74)..(74): Xaa at this position is a single (one, 1) amino acid selected from the following options: Glu Gln Ala
  MISC_FEATURE (96)..(96): Xaa at this position is a single (one, 1) amino acid selected from the following options: His Tyr Ala
  MISC_FEATURE (97)..(97): Xaa at this position is a single (one, 1) amino acid selected from the following options: His Lys Ala
  MISC_FEATURE (103)..(103): Xaa at this position is a single (one, 1) amino acid selected from the following options: His Ala
  MISC_FEATURE (104)..(104): Xaa at this position is a single (one, 1) amino acid selected from the following options: His Ala
HHHHHHDYKDDDDKXRRRRRRRXMAGSALAVRARFGVWGMKVLQTRGFGSEPADNLGSSEAXVWNAGVDFRKRXQAKGERYLRARAKEQLAALKKXXENEISXXVKEI

SEQ ID NO: 325 - protein, 95 aa, Artificial Sequence
  Designed; as detailed elsewhere in present application
  MISC_FEATURE (15)..(15): Xaa at this position is a single (one, 1) amino acid (or lack thereof) selected from the following options: Gly Pro or is absent (no amino acid at this position and so this position is not present)
  MISC_FEATURE (23)..(23): Xaa at this position is a single (one, 1) amino acid (or lack thereof) selected from the following options: Gly Pro or is absent (no amino acid at this position and so this position is not present)
  MISC_FEATURE (49)..(49): Xaa at this position is a single (one, 1) amino acid selected from the following options: Thr Ala
  MISC_FEATURE (61)..(61): Xaa at this position is a single (one, 1) amino acid selected from the following options: Glu Gln Ala
  MISC_FEATURE (83)..(83): Xaa at this position is a single (one, 1) amino acid selected from the following options: His Tyr Ala
  MISC_FEATURE (84)..(84): Xaa at this position is a single (one, 1) amino acid selected from the following options: His Lys Ala
  MISC_FEATURE (90)..(90): Xaa at this position is a single (one, 1) amino acid selected from the following options: His Ala
  MISC_FEATURE (91)..(91): Xaa at this position is a single (one, 1) amino acid selected from the following options: His Ala
HHHHHHDYKDDDDKXRRRRRRRXMAGSALAVRARFGVWGMKVLQTRGFXVWNAGVDFRKRXQAKGERYLRARAKEQLAALKKXXENEISXXVKEI

SEQ ID NO: 326 - protein, 83 aa, Artificial Sequence
  Designed; as detailed elsewhere in present application
  MISC_FEATURE (15)..(15): Xaa at this position is a single (one, 1) amino acid (or lack thereof) selected from the following options: Gly Pro or is absent (no amino acid at this position and so this position is not present)
  MISC_FEATURE (23)..(23): Xaa at this position is a single (one, 1) amino acid (or lack thereof) selected from the following options: Gly Pro or is absent (no amino acid at this position and so this position is not present)
  MISC_FEATURE (50)..(50): Xaa at this position is a single (one, 1) amino acid selected from the following options: Thr Ala
  MISC_FEATURE (62)..(62): Xaa at this position is a single (one, 1) amino acid selected from the following options: Glu Gln Ala
HHHHHHDYKDDDDKXRRRRRRRXMAGSALAVRARFGVWGMKVLQTRGFAXVWNAGVDFRKRXQAKGERYLRARAKEQLAALKK

SEQ ID NO: 327 - protein, 82 aa, Artificial Sequence
  Designed; as detailed elsewhere in present application
  MISC_FEATURE (15)..(15): Xaa at this position is a single (one, 1) amino acid (or lack thereof) selected from the following options: Gly Pro or is absent (no amino acid at this position and so this position is not present)
  MISC_FEATURE (23)..(23): Xaa at this position is a single (one, 1) amino acid (or lack thereof) selected from the following options: Gly Pro or is absent (no amino acid at this position and so this position is not present)
  MISC_FEATURE (49)..(49): Xaa at this position is a single (one, 1) amino acid selected from the following options: Thr Ala
  MISC_FEATURE (61)..(61): Xaa at this position is a single (one, 1) amino acid selected from the following options: Glu Gln Ala
HHHHHHDYKDDDDKXRRRRRRRXMAGSALAVRARFGVWGMKVLQTRGFXVWNAGVDFRKRXQAKGERYLRARAKEQLAALKK

SEQ ID NO: 328 - protein, 65 aa, Artificial Sequence; identical to SEQ ID NO: 322
  Designed; as detailed elsewhere in present application
  MISC_FEATURE (15)..(15): Xaa at this position is a single (one, 1) amino acid (or lack thereof) selected from the following options: Gly Pro or is absent (no amino acid at this position and so this position is not present)
  MISC_FEATURE (23)..(23): Xaa at this position is a single (one, 1) amino acid (or lack thereof) selected from the following options: Gly Pro or is absent (no amino acid at this position and so this position is not present)

SEQ ID NO: 329 - protein, 132 aa, Artificial Sequence
  Designed; as detailed elsewhere in present application
  MISC_FEATURE (15)..(15): Xaa at this position is a single (one, 1) amino acid (or lack thereof) selected from the following options: Gly Pro or is absent (no amino acid at this position and so this position is not present)
  MISC_FEATURE (23)..(23): Xaa at this position is a single (one, 1) amino acid (or lack thereof) selected from the following options: Gly Pro or is absent (no amino acid at this position and so this position is not present)
  MISC_FEATURE (62)..(62): Xaa at this position is a single (one, 1) amino acid selected from the following options: Ser Ala
  MISC_FEATURE (74)..(74): Xaa at this position is a single (one, 1) amino acid selected from the following options: Glu Gln Ala
  MISC_FEATURE (96)..(96): Xaa at this position is a single (one, 1) amino acid selected from the following options: His Tyr Ala
  MISC_FEATURE (97)..(97): Xaa at this position is a single (one, 1) amino acid selected from the following options: His Lys Ala
  MISC_FEATURE (103)..(103): Xaa at this position is a single (one, 1) amino acid selected from the following options: His Ala
  MISC_FEATURE (104)..(104): Xaa at this position is a single (one, 1) amino acid selected from the following options: His Ala
  MISC_FEATURE (124)..(124): Xaa at this position is a single (one, 1) amino acid selected from the following options: Met Gln Lys
  MISC_FEATURE (130)..(130): Asp or is absent (no amino acid at this position and so this position is not present)
  MISC_FEATURE (131)..(131): Asp or is absent (no amino acid at this position and so this position is not present)
  MISC_FEATURE (132)..(132): Asp or is absent (no amino acid at this position and so this position is not present)
HHHHHHDYKDDDDKXRRRRRRRXMAGSALAVRARFGVWGMKVLQTRGFGFSSDKDHESSSGXIRDAGGAFGKRXQAEEERFFRQKTKEQLEALKKXXEDEIYXXKKAIEHMEKEIERHKQKIKXLKHDDXXX

SEQ ID NO: 330 - protein, 108 aa, Artificial Sequence
  Designed; as detailed elsewhere in present application
  MISC_FEATURE (15)..(15): Xaa at this position is a single (one, 1) amino acid (or lack thereof) selected from the following options: Gly Pro or is absent (no amino acid at this position and so this position is not present)
  MISC_FEATURE (23)..(23): Xaa at this position is a single (one, 1) amino acid (or lack thereof) selected from the following options: Gly Pro or is absent (no amino acid at this position and so this position is not present)
  MISC_FEATURE (62)..(62): Xaa at this position is a single (one, 1) amino acid selected from the following options: Ser Ala
  MISC_FEATURE (74)..(74): Xaa at this position is a single (one, 1) amino acid selected from the following options: Glu Gln Ala
  MISC_FEATURE (96)..(96): Xaa at this position is a single (one, 1) amino acid selected from the following options: His Tyr Ala
  MISC_FEATURE (97)..(97): Xaa at this position is a single (one, 1) amino acid selected from the following options: His Lys Ala
  MISC_FEATURE (103)..(103): Xaa at this position is a single (one, 1) amino acid selected from the following options: His Ala
  MISC_FEATURE (104)..(104): Xaa at this position is a single (one, 1) amino acid selected from the following options: His Ala
HHHHHHDYKDDDDKXRRRRRRRXMAGSALAVRARFGVWGMKVLQTRGFGFSSDKDHESSSGXIRDAGGAFGKRXQAEEERFFRQKTKEQLEALKKXXEDEIYXXKKAI

SEQ ID NO: 331 - protein, 99 aa, Artificial Sequence
  Designed; as detailed elsewhere in present application
  MISC_FEATURE (15)..(15): Xaa at this position is a single (one, 1) amino acid (or lack thereof) selected from the following options: Gly Pro or is absent (no amino acid at this position and so this position is not present)
  MISC_FEATURE (23)..(23): Xaa at this position is a single (one, 1) amino acid (or lack thereof) selected from the following options: Gly Pro or is absent (no amino acid at this position and so this position is not present)
  MISC_FEATURE (53)..(53): Xaa at this position is a single (one, 1) amino acid selected from the following options: Ser Ala
  MISC_FEATURE (65)..(65): Xaa at this position is a single (one, 1) amino acid selected from the following options: Glu Gln Ala
  MISC_FEATURE (87)..(87): Xaa at this position is a single (one, 1) amino acid selected from the following options: His Tyr Ala
  MISC_FEATURE (88)..(88): Xaa at this position is a single (one, 1) amino acid selected from the following options: His Lys Ala
  MISC_FEATURE (94)..(94): Xaa at this position is a single (one, 1) amino acid selected from the following options: His Ala
  MISC_FEATURE (95)..(95): Xaa at this position is a single (one, 1) amino acid selected from the following options: His Ala
HHHHHHDYKDDDDKXRRRRRRRXMAGSALAVRARFGVWGMKVLQTRGFSSSGXIRDAGGAFGKRXQAEEERFFRQKTKEQLEALKKXXEDEIYXXKKAI

SEQ ID NO: 332 - protein, 95 aa, Artificial Sequence
  Designed; as detailed elsewhere in present application
  MISC_FEATURE (15)..(15): Xaa at this position is a single (one, 1) amino acid (or lack thereof) selected from the following options: Gly Pro or is absent (no amino acid at this position and so this position is not present)
  MISC_FEATURE (23)..(23): Xaa at this position is a single (one, 1) amino acid (or lack thereof) selected from the following options: Gly Pro or is absent (no amino acid at this position and so this position is not present)
  MISC_FEATURE (49)..(49): Xaa at this position is a single (one, 1) amino acid selected from the following options: Ser Ala
  MISC_FEATURE (61)..(61): Xaa at this position is a single (one, 1) amino acid selected from the following options: Glu Gln Ala
  MISC_FEATURE (83)..(83): Xaa at this position is a single (one, 1) amino acid selected from the following options: His Tyr Ala
  MISC_FEATURE (84)..(84): Xaa at this position is a single (one, 1) amino acid selected from the following options: His Lys Ala
  MISC_FEATURE (90)..(90): Xaa at this position is a single (one, 1) amino acid selected from the following options: His Ala
  MISC_FEATURE (91)..(91): Xaa at this position is a single (one, 1) amino acid selected from the following options: His Ala
HHHHHHDYKDDDDKXRRRRRRRXMAGSALAVRARFGVWGMKVLQTRGFXIRDAGGAFGKRXQAEEERFFRQKTKEQLEALKKXXEDEIYXXKKAI

SEQ ID NO: 333 - protein, 83 aa, Artificial Sequence
  Designed; as detailed elsewhere in present application
  MISC_FEATURE (15)..(15): Xaa at this position is a single (one, 1) amino acid (or lack thereof) selected from the following options: Gly Pro or is absent (no amino acid at this position and so this position is not present)
  MISC_FEATURE (23)..(23): Xaa at this position is a single (one, 1) amino acid (or lack thereof) selected from the following options: Gly Pro or is absent (no amino acid at this position and so this position is not present)
  MISC_FEATURE (50)..(50): Xaa at this position is a single (one, 1) amino acid selected from the following options: Ser Ala
  MISC_FEATURE (62)..(62): Xaa at this position is a single (one, 1) amino acid selected from the following options: Glu Gln Ala
HHHHHHDYKDDDDKXRRRRRRRXMAGSALAVRARFGVWGMKVLQTRGFGXIRDAGGAFGKRXQAEEERFFRQKTKEQLEALKK

SEQ ID NO: 334 - protein, 82 aa, Artificial Sequence
  Designed; as detailed elsewhere in present application
  MISC_FEATURE (15)..(15): Xaa at this position is a single (one, 1) amino acid (or lack thereof) selected from the following options: Gly Pro or is absent (no amino acid at this position and so this position is not present)
  MISC_FEATURE (23)..(23): Xaa at this position is a single (one, 1) amino acid (or lack thereof) selected from the following options: Gly Pro or is absent (no amino acid at this position and so this position is not present)
  MISC_FEATURE (49)..(49): Xaa at this position is a single (one, 1) amino acid selected from the following options: Ser Ala
  MISC_FEATURE (61)..(61): Xaa at this position is a single (one, 1) amino acid selected from the following options: Glu Gln Ala
HHHHHHDYKDDDDKXRRRRRRRXMAGSALAVRARFGVWGMKVLQTRGFXIRDAGGAFGKRXQAEEERFFRQKTKEQLEALKK

SEQ ID NO: 335 - protein, 65 aa, Artificial Sequence
  Designed; as detailed elsewhere in present application
  MISC_FEATURE (15)..(15): Xaa at this position is a single (one, 1) amino acid (or lack thereof) selected from the following options: Gly Pro or is absent (no amino acid at this position and so this position is not present)
  MISC_FEATURE (23)..(23): Xaa at this position is a single (one, 1) amino acid (or lack thereof) selected from the following options: Gly Pro or is absent (no amino acid at this position and so this position is not present)
HHHHHHDYKDDDDKXRRRRRRRXMAGSALAVRARFGVWGMKVLQTRGFLEALKKHHEDEIYHHKK

SEQ ID NO: 336 - protein, 107 aa, Balaena mysticetus; identical to SEQ ID NO: 12

SEQ ID NO: 337 - protein, 107 aa, Balaenoptera musculus
MAAVELVAWMQLRVWSVWVMQGLGFGSEPADNLGSSEATVWNAGVDFRKREQAKGERYLRARAKEQLAALKKHHENEISHHVKEIEHLQKEIERHKQSIKKLKHDDD

SEQ ID NO: 338 - protein, 89 aa, Artificial Sequence
  Designed; as detailed elsewhere in present application
  MISC_FEATURE (1)..(89): These amino acids are D-amino acids
  MISC_FEATURE (5)..(5): Xaa at this position is a single (one, 1) amino acid selected from the following options: His Ala
  MISC_FEATURE (6)..(6): Xaa at this position is a single (one, 1) amino acid selected from the following options: His Ala
  MISC_FEATURE (12)..(12): Xaa at this position is a single (one, 1) amino acid selected from the following options: His Lys Ala
  MISC_FEATURE (13)..(13): Xaa at this position is a single (one, 1) amino acid selected from the following options: His Tyr Ala
  MISC_FEATURE (35)..(35): Xaa at this position is a single (one, 1) amino acid selected from the following options: Glu Gln Ala
  MISC_FEATURE (77)..(77): Xaa at this position is a single (one, 1) amino acid (or lack thereof) selected from the following options: Gly Pro or is absent (no amino acid at this position and so this position is not present)
  MISC_FEATURE (87)..(87): Gly or is absent (no amino acid at this position and so this position is not present)
  MISC_FEATURE (88)..(88): Tyr or is absent (no amino acid at this position and so this position is not present)
  MISC_FEATURE (89)..(89): Xaa at this position is a single (one, 1) amino acid (or lack thereof) selected from the following options: Gly Pro or is absent (no amino acid at this position and so this position is not present)
IEKAXXSIENEXXKKLAALQEKARARFYREEEAQXRKGFAGGADRVAGASSFGRAQMTRVGWVGLWTRAALATVAMXRRRQRRKKRXXX

SEQ ID NO: 339 - protein, 85 aa, Artificial Sequence
  Designed; as detailed elsewhere in present application
  MISC_FEATURE (1)..(85): These amino acids are D-amino acids
  MISC_FEATURE (5)..(5): Xaa at this position is a single (one, 1) amino acid selected from the following options: His Ala
  MISC_FEATURE (6)..(6): Xaa at this position is a single (one, 1) amino acid selected from the following options: His Ala
  MISC_FEATURE (12)..(12): Xaa at this position is a single (one, 1) amino acid selected from the following options: His Lys Ala
  MISC_FEATURE (13)..(13): Xaa at this position is a single (one, 1) amino acid selected from the following options: His Tyr Ala
  MISC_FEATURE (35)..(35): Xaa at this position is a single (one, 1) amino acid selected from the following options: Glu Gln Ala
  MISC_FEATURE (73)..(73): Xaa at this position is a single (one, 1) amino acid (or lack thereof) selected from the following options: Gly Pro or is absent (no amino acid at this position and so this position is not present)
  MISC_FEATURE (74)..(74): Gly or is absent (no amino acid at this position and so this position is not present)
  MISC_FEATURE (84)..(84): Tyr or is absent (no amino acid at this position and so this position is not present)
  MISC_FEATURE (85)..(85): Xaa at this position is a single (one, 1) amino acid (or lack thereof) selected from the following options: Gly Pro or is absent (no amino acid at this position and so this position is not present)
IEKAXXSIENEXXKKLAALQEKARARFYREEEAQXRKGFAGGADRVAFGRAQMTRVGWVGLWTRAALATVAMXRRRQRRKKRXXX

SEQ ID NO: 340 - protein, 72 aa, Artificial Sequence
  Designed; as detailed elsewhere in present application
  MISC_FEATURE (1)..(72): These amino acids are D-amino acids
  MISC_FEATURE (22)..(22): Xaa at this position is a single (one, 1) amino acid selected from the following options: Glu Gln Ala
  MISC_FEATURE (60)..(60): Xaa at this position is a single (one, 1) amino acid (or lack thereof) selected from the following options: Gly Pro or is absent (no amino acid at this position and so this position is not present)
  MISC_FEATURE (70)..(70): Gly or is absent (no amino acid at this position and so this position is not present)
  MISC_FEATURE (71)..(71): Tyr or is absent (no amino acid at this position and so this position is not present)
  MISC_FEATURE (72)..(72): Xaa at this position is a single (one, 1) amino acid (or lack thereof) selected from the following options: Gly Pro or is absent (no amino acid at this position and so this position is not present)
KKLAALQEKARARFYREEEAQXRKGFAGGADRVAFGRAQMTRVGWVGLWTRAALATVAMXRRRQRRKKRXXX

SEQ ID NO: 341 - protein, 55 aa, Artificial Sequence
  Designed; as detailed elsewhere in present application
  MISC_FEATURE (1)..(55): These amino acids are D-amino acids
  MISC_FEATURE (43)..(43): Xaa at this position is a single (one, 1) amino acid (or lack thereof) selected from the following options: Gly Pro or is absent (no amino acid at this position and so this position is not present)
  MISC_FEATURE (53)..(53): Gly or is absent (no amino acid at this position and so this position is not present)
  MISC_FEATURE (54)..(54): Tyr or is absent (no amino acid at this position and so this position is not present)
  MISC_FEATURE (55)..(55): Xaa at this position is a single (one, 1) amino acid (or lack thereof) selected from the following options: Gly Pro or is absent (no amino acid at this position and so this position is not present)
KAHHSIENEHHKKLAALFGRAQMTRVGWVGLWTRAALATVAMXRRRQRRKKRXXX

SEQ ID NO: 342 - protein, 89 aa, Artificial Sequence
  Designed; as detailed elsewhere in present application
  MISC_FEATURE (1)..(89): These amino acids are D-amino acids
  MISC_FEATURE (5)..(5): Xaa at this position is a single (one, 1) amino acid selected from the following options: His Ala
  MISC_FEATURE (6)..(6): Xaa at this position is a single (one, 1) amino acid selected from the following options: His Ala
  MISC_FEATURE (12)..(12): Xaa at this position is a single (one, 1) amino acid selected from the following options: His Lys Ala
  MISC_FEATURE (13)..(13): Xaa at this position is a single (one, 1) amino acid selected from the following options: His Tyr Ala
  MISC_FEATURE (35)..(35): Xaa at this position is a single (one, 1) amino acid selected from the following options: Glu Gln Ala
  MISC_FEATURE (47)..(47): Xaa at this position is a single (one, 1) amino acid selected from the following options: Ser Ala
  MISC_FEATURE (77)..(77): Xaa at this position is a single (one, 1) amino acid (or lack thereof) selected from the following options: Gly Pro or is absent (no amino acid at this position and so this position is not present)
  MISC_FEATURE (87)..(87): Gly or is absent (no amino acid at this position and so this position is not present)
  MISC_FEATURE (88)..(88): Tyr or is absent (no amino acid at this position and so this position is not present)
  MISC_FEATURE (89)..(89): Xaa at this position is a single (one, 1) amino acid (or lack thereof) selected from the following options: Gly Pro or is absent (no amino acid at this position and so this position is not present)
IEKKXXVIEEEXXKKLAALQERSQARFYREEEAQXRKGFAGGAERIXGAGRFGRAQMTRVGWVGLWTRAALATVAMXRRRQRRKKRXXX

SEQ ID NO: 343 - protein, 85 aa, Artificial Sequence
  Designed; as detailed elsewhere in present application
  MISC_FEATURE (1)..(85): These amino acids are D-amino acids
  MISC_FEATURE (5)..(5): Xaa at this position is a single (one, 1) amino acid selected from the following options: His Ala
  MISC_FEATURE (6)..(6): Xaa at this position is a single (one, 1) amino acid selected from the following options: His Ala
  MISC_FEATURE (12)..(12): Xaa at this position is a single (one, 1) amino acid selected from the following options: His Lys Ala
  MISC_FEATURE (13)..(13): Xaa at this position is a single (one, 1) amino acid selected from the following options: His Tyr Ala
  MISC_FEATURE (35)..(35): Xaa at this position is a single (one, 1) amino acid selected from the following options: Glu Gln Ala
  MISC_FEATURE (47)..(47): Xaa at this position is a single (one, 1) amino acid selected from the following options: Ser Ala
  MISC_FEATURE (73)..(73): Xaa at this position is a single (one, 1) amino acid (or lack thereof) selected from the following options: Gly Pro or is absent (no amino acid at this position and so this position is not present)
  MISC_FEATURE (83)..(83): Gly or is absent (no amino acid at this position and so this position is not present)
  MISC_FEATURE (84)..(84): Tyr or is absent (no amino acid at this position and so this position is not present)
  MISC_FEATURE (85)..(85): Xaa at this position is a single (one, 1) amino acid (or lack thereof) selected from the following options: Gly Pro or is absent (no amino acid at this position and so this position is not present)
IEKKXXVIEEEXXKKLAALQERSQARFYREEEAQXRKGFAGGAERIXFGRAQMTRVGWVGLWTRAALATVAMXRRRQRRKKRXXX

SEQ ID NO: 344 - protein, 72 aa, Artificial Sequence
  Designed; as detailed elsewhere in present application
  MISC_FEATURE (1)..(72): These amino acids are D-amino acids
  MISC_FEATURE (22)..(22): Xaa at this position is a single (one, 1) amino acid selected from the following options: Glu Gln Ala
  MISC_FEATURE (34)..(34): Xaa at this position is a single (one, 1) amino acid selected from the following options: Ser Ala
  MISC_FEATURE (60)..(60): Xaa at this position is a single (one, 1) amino acid (or lack thereof) selected from the following options: Gly Pro or is absent (no amino acid at this position and so this position is not present)
  MISC_FEATURE (70)..(70): Gly or is absent (no amino acid at this position and so this position is not present)
  MISC_FEATURE (71)..(71): Tyr or is absent (no amino acid at this position and so this position is not present)
  MISC_FEATURE (72)..(72): Xaa at this position is a single (one, 1) amino acid (or lack thereof) selected from the following options: Gly Pro or is absent (no amino acid at this position and so this position is not present)
KKLAALQERSQARFYREEEAQXRKGFAGGAERIXFGRAQMTRVGWVGLWTRAALATVAMXRRRQRRKKRXXX

SEQ ID NO: 345 - protein, 55 aa, Artificial Sequence
  Designed; as detailed elsewhere in present application
  MISC_FEATURE (1)..(55): These amino acids are D-amino acids
  MISC_FEATURE (43)..(43): Xaa at this position is a single (one, 1) amino acid (or lack thereof) selected from the following options: Gly Pro or is absent (no amino acid at this position and so this position is not present)
  MISC_FEATURE (53)..(53): Gly or is absent (no amino acid at this position and so this position is not present)
  MISC_FEATURE (54)..(54): Tyr or is absent (no amino acid at this position and so this position is not present)
  MISC_FEATURE (55)..(55): Xaa at this position is a single (one, 1) amino acid (or lack thereof) selected from the following options: Gly Pro or is absent (no amino acid at this position and so this position is not present)
KKHHVIEEEHHKKLAALFGRAQMTRVGWVGLWTRAALATVAMXRRRQRRKKRXXX

SEQ ID NO: 346 - protein, 89 aa, Artificial Sequence
  Designed; as detailed elsewhere in present application
  MISC_FEATURE (1)..(89): These amino acids are D-amino acids
  MISC_FEATURE (5)..(5): Xaa at this position is a single (one, 1) amino acid selected from the following options: His Ala
  MISC_FEATURE (6)..(6): Xaa at this position is a single (one, 1) amino acid selected from the following options: His Ala
  MISC_FEATURE (12)..(12): Xaa at this position is a single (one, 1) amino acid selected from the following options: His Lys Ala
  MISC_FEATURE (13)..(13): Xaa at this position is a single (one, 1) amino acid selected from the following options: His Tyr Ala
  MISC_FEATURE (35)..(35): Xaa at this position is a single (one, 1) amino acid selected from the following options: Glu Gln Ala
  MISC_FEATURE (77)..(77): Xaa at this position is a single (one, 1) amino acid (or lack thereof) selected from the following options: Gly Pro or is absent (no amino acid at this position and so this position is not present)
  MISC_FEATURE (87)..(87): Gly or is absent (no amino acid at this position and so this position is not present)
  MISC_FEATURE (88)..(88): Tyr or is absent (no amino acid at this position and so this position is not present)
  MISC_FEATURE (89)..(89): Xaa at this position is a single (one, 1) amino acid (or lack thereof) selected from the following options: Gly Pro or is absent (no amino acid at this position and so this position is not present)
IEKVXXSIENEXXKKLAALQEKARARFYREEEAQXKKGFAGGADRIAGASSFGRAQMTRVGWVGLWTRAALATVAMXRRRQRRKKRXXX

SEQ ID NO: 347 - protein, 85 aa, Artificial Sequence
  Designed; as detailed elsewhere in present application
  MISC_FEATURE (5)..(5): Xaa at this position is a single (one, 1) amino acid selected from the following options: His Ala
  MISC_FEATURE (6)..(6): Xaa at this position is a single (one, 1) amino acid selected from the following options: His Ala
  MISC_FEATURE (12)..(12): Xaa at this position is a single (one, 1) amino acid selected from the following options: His Lys Ala
  MISC_FEATURE (13)..(13): Xaa at this position is a single (one, 1) amino acid selected from the following options: His Tyr Ala
  MISC_FEATURE (35)..(35): Xaa at this position is a single (one, 1) amino acid selected from the following options: Glu Gln Ala
  MISC_FEATURE (73)..(73): Xaa at this position is a single (one, 1) amino acid (or lack thereof) selected from the following options: Gly Pro or is absent (no amino acid at this position and so this position is not present)
  MISC_FEATURE (81)..(85): These amino acids are D-amino acids
  MISC_FEATURE (83)..(83): Gly or is absent (no amino acid at this position and so this position is not present)
  MISC_FEATURE (84)..(84): Tyr or is absent (no amino acid at this position and so this position is not present)
  MISC_FEATURE (85)..(85): Xaa at this position is a single (one, 1) amino acid (or lack thereof) selected from the following options: Gly Pro or is absent (no amino acid at this position and so this position is not present)
IEKVXXSIENEXXKKLAALQEKARARFYREEEAQXKKGFAGGADRIAFGRAQMTRVGWVGLWTRAALATVAMXRRRQRRKKRXXX

SEQ ID NO: 348 - protein, 72 aa, Artificial Sequence
  Designed; as detailed elsewhere in present application
  MISC_FEATURE (1)..(72): These amino acids are D-amino acids
  MISC_FEATURE (22)..(22): Xaa at this position is a single (one, 1) amino acid selected from the following options: Glu Gln Ala
  MISC_FEATURE (60)..(60): Xaa at this position is a single (one, 1) amino acid (or lack thereof) selected from the following options: Gly Pro or is absent (no amino acid at this position and so this position is not present)
  MISC_FEATURE (70)..(70): Gly or is absent (no amino acid at this position and so this position is not present)
  MISC_FEATURE (71)..(71): Tyr or is absent (no amino acid at this position and so this position is not present)
  MISC_FEATURE (72)..(72): Xaa at this position is a single (one, 1) amino acid (or lack thereof) selected from the following options: Gly Pro or is absent (no amino acid at this position and so this position is not present)
KKLAALQEKARARFYREEEAQXKKGFAGGADRIAFGRAQMTRVGWVGLWTRAALATVAMXRRRQRRKKRXXX

SEQ ID NO: 349 - protein, 55 aa, Artificial Sequence
  Designed; as detailed elsewhere in present application
  MISC_FEATURE (1)..(55): These amino acids are D-amino acids
  MISC_FEATURE (43)..(43): Xaa at this position is a single (one, 1) amino acid (or lack thereof) selected from the following options: Gly Pro or is absent (no amino acid at this position and so this position is not present)
  MISC_FEATURE (53)..(53): Gly or is absent (no amino acid at this position and so this position is not present)
  MISC_FEATURE (54)..(54): Tyr or is absent (no amino acid at this position and so this position is not present)
  MISC_FEATURE (55)..(55): Xaa at this position is a single (one, 1) amino acid (or lack thereof) selected from the following options: Gly Pro or is absent (no amino acid at this position and so this position is not present)
KVHHSIENEHHKKLAALFGRAQMTRVGWVGLWTRAALATVAMXRRRQRRKKRXXX

SEQ ID NO: 350 - protein, 89 aa, Artificial Sequence
  Designed; as detailed elsewhere in present application
  MISC_FEATURE (1)..(89): These amino acids are D-amino acids
  MISC_FEATURE (5)..(5): Xaa at this position is a single (one, 1) amino acid selected from the following options: His Ala
  MISC_FEATURE (6)..(6): Xaa at this position is a single (one, 1) amino acid selected from the following options: His Ala
  MISC_FEATURE (12)..(12): Xaa at this position is a single (one, 1) amino acid selected from the following options: His Lys Ala
  MISC_FEATURE (13)..(13): Xaa at this position is a single (one, 1) amino acid selected from the following options: His Tyr Ala
  MISC_FEATURE (35)..(35): Xaa at this position is a single (one, 1) amino acid selected from the following options: Glu Gln Ala
  MISC_FEATURE (47)..(47): Xaa at this position is a single (one, 1) amino acid selected from the following options: Thr Ala
  MISC_FEATURE (77)..(77): Xaa at this position is a single (one, 1) amino acid (or lack thereof) selected from the following options: Gly Pro or is absent (no amino acid at this position and so this position is not present)
  MISC_FEATURE (87)..(87): Gly or is absent (no amino acid at this position and so this position is not present)
  MISC_FEATURE (88)..(88): Tyr or is absent (no amino acid at this position and so this position is not present)
  MISC_FEATURE (89)..(89): Xaa at this position is a single (one, 1) amino acid (or lack thereof) selected from the following options: Gly Pro or is absent (no amino acid at this position and so this position is not present)
IEKVXXSIENEXXKKLAALQEKARARLYREGKAQXRKRFDVGANWVXAESSFGRAQMTRVGWVGLWTRAALATVAMXRRRQRRKKRXXX

SEQ ID NO: 351 - protein, 85 aa, Artificial Sequence
  Designed; as detailed elsewhere in present application
  MISC_FEATURE (1)..(85): These amino acids are D-amino acids
  MISC_FEATURE (5)..(5): Xaa at this position is a single (one, 1) amino acid selected from the following options: His Ala
  MISC_FEATURE (6)..(6): Xaa at this position is a single (one, 1) amino acid selected from the following options: His Ala
  MISC_FEATURE (12)..(12): Xaa at this position is a single (one, 1) amino acid selected from the following options: His Lys Ala
  MISC_FEATURE (13)..(13): Xaa at this position is a single (one, 1) amino acid selected from the following options: His Tyr Ala
  MISC_FEATURE (35)..(35): Xaa at this position is a single (one, 1) amino acid selected from the following options: Glu Gln Ala
  MISC_FEATURE (47)..(47): Xaa at this position is a single (one, 1) amino acid selected from the following options: Thr Ala
  MISC_FEATURE (73)..(73): Xaa at this position is a single (one, 1) amino acid (or lack thereof) selected from the following options: Gly Pro or is absent (no amino acid at this position and so this position is not present)
  MISC_FEATURE (83)..(83): Gly or is absent (no amino acid at this position and so this position is not present)
  MISC_FEATURE (84)..(84): Tyr or is absent (no amino acid at this position and so this position is not present)
  MISC_FEATURE (85)..(85): Xaa at this position is a single (one, 1) amino acid (or lack thereof) selected from the following options: Gly Pro or is absent (no amino acid at this position and so this position is not present)
IEKVXXSIENEXXKKLAALQEKARARLYREGKAQXRKRFDVGANWVXFGRAQMTRVGWVGLWTRAALATVAMXRRRQRRKKRXXX

SEQ ID NO: 352 - protein, 72 aa, Artificial Sequence
  Designed; as detailed elsewhere in present application
  MISC_FEATURE (1)..(72): These amino acids are D-amino acids
  MISC_FEATURE (22)..(22): Xaa at this position is a single (one, 1) amino acid selected from the following options: Glu Gln Ala
  MISC_FEATURE (34)..(34): Xaa at this position is a single (one, 1) amino acid selected from the following options: Thr Ala
  MISC_FEATURE (60)..(60): Xaa at this position is a single (one, 1) amino acid (or lack thereof) selected from the following options: Gly Pro or is absent (no amino acid at this position and so this position is not present)
  MISC_FEATURE (70)..(70): Gly or is absent (no amino acid at this position and so this position is not present)
  MISC_FEATURE (71)..(71): Tyr or is absent (no amino acid at this position and so this position is not present)
  MISC_FEATURE (72)..(72): Xaa at this position is a single (one, 1) amino acid (or lack thereof) selected from the following options: Gly Pro or is absent (no amino acid at this position and so this position is not present)
KKLAALQEKARARLYREGKAQXRKRFDVGANWVXFGRAQMTRVGWVGLWTRAALATVAMXRRRQRRKKRXXX

SEQ ID NO: 353 - protein, 55 aa, Artificial Sequence; identical to SEQ ID NO: 349
  Designed; as detailed elsewhere in present application
  MISC_FEATURE (1)..(55): These amino acids are D-amino acids
  MISC_FEATURE (43)..(43): Xaa at this position is a single (one, 1) amino acid (or lack thereof) selected from the following options: Gly Pro or is absent (no amino acid at this position and so this position is not present)
  MISC_FEATURE (53)..(53): Gly or is absent (no amino acid at this position and so this position is not present)
  MISC_FEATURE (54)..(54): Tyr or is absent (no amino acid at this position and so this position is not present)
  MISC_FEATURE (55)..(55): Xaa at this position is a single (one, 1) amino acid (or lack thereof) selected from the following options: Gly Pro or is absent (no amino acid at this position and so this position is not present)

SEQ ID NO: 354 - protein, 85 aa, Artificial Sequence
  Designed; as detailed elsewhere in present application
  MISC_FEATURE (1)..(85): These amino acids are D-amino acids
  MISC_FEATURE (5)..(5): Xaa at this position is a single (one, 1) amino acid selected from the following options: His Ala
  MISC_FEATURE (6)..(6): Xaa at this position is a single (one, 1) amino acid selected from the following options: His Ala
  MISC_FEATURE (12)..(12): Xaa at this position is a single (one, 1) amino acid selected from the following options: His Lys Ala
  MISC_FEATURE (13)..(13): Xaa at this position is a single (one, 1) amino acid selected from the following options: His Tyr Ala
  MISC_FEATURE (35)..(35): Xaa at this position is a single (one, 1) amino acid selected from the following options: Glu Gln Ala
  MISC_FEATURE (77)..(77): Xaa at this position is a single (one, 1) amino acid (or lack thereof) selected from the following options: Gly Pro or is absent (no amino acid at this position and so this position is not present)
  MISC_FEATURE (85)..(85): Xaa at this position is a single (one, 1) amino acid (or lack thereof) selected from the following options: Gly Pro or is absent (no amino acid at this position and so this position is not present)
IEKAXXSIENEXXKKLAALQEKARARFYREEEAQXRKGFAGGADRVAGASSFGRAQMTRVGWVGLWTRAALATVAMXRRRRRRRX

SEQ ID NO: 355 - protein, 81 aa, Artificial Sequence
  Designed; as detailed elsewhere in present application
  MISC_FEATURE (1)..(81): These amino acids are D-amino acids
  MISC_FEATURE (5)..(5): Xaa at this position is a single (one, 1) amino acid selected from the following options: His Ala
  MISC_FEATURE (6)..(6): Xaa at this position is a single (one, 1) amino acid selected from the following options: His Ala
  MISC_FEATURE (12)..(12): Xaa at this position is a single (one, 1) amino acid selected from the following options: His Lys Ala
  MISC_FEATURE (13)..(13): Xaa at this position is a single (one, 1) amino acid selected from the following options: His Tyr Ala
  MISC_FEATURE (35)..(35): Xaa at this position is a single (one, 1) amino acid selected from the following options: Glu Gln Ala
  MISC_FEATURE (73)..(73): Xaa at this position is a single (one, 1) amino acid (or lack thereof) selected from the following options: Gly Pro or is absent (no amino acid at this position and so this position is not present)
  MISC_FEATURE (81)..(81): Xaa at this position is a single (one, 1) amino acid (or lack thereof) selected from the following options: Gly Pro or is absent (no amino acid at this position and so this position is not present)
IEKAXXSIENEXXKKLAALQEKARARFYREEEAQXRKGFAGGADRVAFGRAQMTRVGWVGLWTRAALATVAMXRRRRRRRX

SEQ ID NO: 356 - protein, 68 aa, Artificial Sequence
  Designed; as detailed elsewhere in present application
  MISC_FEATURE (1)..(68): These amino acids are D-amino acids
  MISC_FEATURE (22)..(22): Xaa at this position is a single (one, 1) amino acid selected from the following options: Glu Gln Ala
  MISC_FEATURE (60)..(60): Xaa at this position is a single (one, 1) amino acid (or lack thereof) selected from the following options: Gly Pro or is absent (no amino acid at this position and so this position is not present)
  MISC_FEATURE (68)..(68): Xaa at this position is a single (one, 1) amino acid (or lack thereof) selected from the following options: Gly Pro or is absent (no amino acid at this position and so this position is not present)
KKLAALQEKARARFYREEEAQXRKGFAGGADRVAFGRAQMTRVGWVGLWTRAALATVAMXRRRRRRRX

SEQ ID NO: 357 - protein, 51 aa, Artificial Sequence
  Designed; as detailed elsewhere in present application
  MISC_FEATURE (1)..(51): These amino acids are D-amino acids
  MISC_FEATURE (43)..(43): Xaa at this position is a single (one, 1) amino acid (or lack thereof) selected from the following options: Gly Pro or is absent (no amino acid at this position and so this position is not present)
  MISC_FEATURE (51)..(51): Xaa at this position is a single (one, 1) amino acid (or lack thereof) selected from the following options: Gly Pro or is absent (no amino acid at this position and so this position is not present)
KAHHSIENEHHKKLAALFGRAQMTRVGWVGLWTRAALATVAMXRRRRRRRX

SEQ ID NO: 358 - protein, 85 aa, Artificial Sequence
  Designed; as detailed elsewhere in present application
  MISC_FEATURE (1)..(85): These amino acids are D-amino acids
  MISC_FEATURE (5)..(5): Xaa at this position is a single (one, 1) amino acid selected from the following options: His Ala
  MISC_FEATURE (6)..(6): Xaa at this position is a single (one, 1) amino acid selected from the following options: His Ala
  MISC_FEATURE (12)..(12): Xaa at this position is a single (one, 1) amino acid selected from the following options: His Lys Ala
  MISC_FEATURE (13)..(13): Xaa at this position is a single (one, 1) amino acid selected from the following options: His Tyr Ala
  MISC_FEATURE (35)..(35): Xaa at this position is a single (one, 1) amino acid selected from the following options: Glu Gln Ala
  MISC_FEATURE (47)..(47): Xaa at this position is a single (one, 1) amino acid selected from the following options: Ser Ala
  MISC_FEATURE (77)..(77): Xaa at this position is a single (one, 1) amino acid (or lack thereof) selected from the following options: Gly Pro or is absent (no amino acid at this position and so this position is not present)
  MISC_FEATURE (85)..(85): Xaa at this position is a single (one, 1) amino acid (or lack thereof) selected from the following options: Gly Pro or is absent (no amino acid at this position and so this position is not present)
IEKKXXVIEEEXXKKLAALQERSQARFYREEEAQXRKGFAGGAERIXGAGRFGRAQMTRVGWVGLWTRAALATVAMXRRRRRRRX

SEQ ID NO: 359 - protein, 81 aa, Artificial Sequence
  Designed; as detailed elsewhere in present application
  MISC_FEATURE (1)..(81): These amino acids are D-amino acids
  MISC_FEATURE (5)..(5): Xaa at this position is a single (one, 1) amino acid selected from the following options: His Ala
  MISC_FEATURE (6)..(6): Xaa at this position is a single (one, 1) amino acid selected from the following options: His Ala
  MISC_FEATURE (12)..(12): Xaa at this position is a single (one, 1) amino acid selected from the following options: His Lys Ala
  MISC_FEATURE (13)..(13): Xaa at this position is a single (one, 1) amino acid selected from the following options: His Tyr Ala
  MISC_FEATURE (35)..(35): Xaa at this position is a single (one, 1) amino acid selected from the following options: Glu Gln Ala
  MISC_FEATURE (47)..(47): Xaa at this position is a single (one, 1) amino acid selected from the following options: Ser Ala
  MISC_FEATURE (73)..(73): Xaa at this position is a single (one, 1) amino acid (or lack thereof) selected from the following options: Gly Pro or is absent (no amino acid at this position and so this position is not present)
  MISC_FEATURE (81)..(81): Xaa at this position is a single (one, 1) amino acid (or lack thereof) selected from the following options: Gly Pro or is absent (no amino acid at this position and so this position is not present)
IEKKXXVIEEEXXKKLAALQERSQARFYREEEAQXRKGFAGGAERIXFGRAQMTRVGWVGLWTRAALATVAMXRRRRRRRX

SEQ ID NO: 360 - protein, 68 aa, Artificial Sequence
  Designed; as detailed elsewhere in present application
  MISC_FEATURE (1)..(68): These amino acids are D-amino acids
  MISC_FEATURE (22)..(22): Xaa at this position is a single (one, 1) amino acid selected from the following options: Glu Gln Ala
  MISC_FEATURE (34)..(34): Xaa at this position is a single (one, 1) amino acid selected from the following options: Ser Ala
  MISC_FEATURE (60)..(60): Xaa at this position is a single (one, 1) amino acid (or lack thereof) selected from the following options: Gly Pro or is absent (no amino acid at this position and so this position is not present)
  MISC_FEATURE (68)..(68): Xaa at this position is a single (one, 1) amino acid (or lack thereof) selected from the following options: Gly Pro or is absent (no amino acid at this position and so this position is not present)
KKLAALQERSQARFYREEEAQXRKGFAGGAERIXFGRAQMTRVGWVGLWTRAALATVAMXRRRRRRRX

SEQ ID NO: 361 - protein, 51 aa, Artificial Sequence
  Designed; as detailed elsewhere in present application
  MISC_FEATURE (1)..(51): These amino acids are D-amino acids
  MISC_FEATURE (43)..(43): Xaa at this position is a single (one, 1) amino acid (or lack thereof) selected from the following options: Gly Pro or is absent (no amino acid at this position and so this position is not present)
  MISC_FEATURE (51)..(51): Xaa at this position is a single (one, 1) amino acid (or lack thereof) selected from the following options: Gly Pro or is absent (no amino acid at this position and so this position is not present)
KKHHVIEEEHHKKLAALFGRAQMTRVGWVGLWTRAALATVAMXRRRRRRRX

SEQ ID NO: 362 - protein, 85 aa, Artificial Sequence
  Designed; as detailed elsewhere in present application
  MISC_FEATURE (1)..(85): These amino acids are D-amino acids
  MISC_FEATURE (5)..(5): Xaa at this position is a single (one, 1) amino acid selected from the following options: His Ala
  MISC_FEATURE (6)..(6): Xaa at this position is a single (one, 1) amino acid selected from the following options: His Ala
  MISC_FEATURE (12)..(12): Xaa at this position is a single (one, 1) amino acid selected from the following options: His Lys Ala
  MISC_FEATURE (13)..(13): Xaa at this position is a single (one, 1) amino acid selected from the following options: His Tyr Ala
  MISC_FEATURE (35)..(35): Xaa at this position is a single (one, 1) amino acid selected from the following options: Glu Gln Ala
  MISC_FEATURE (77)..(77): Xaa at this position is a single (one, 1) amino acid (or lack thereof) selected from the following options: Gly Pro or is absent (no amino acid at this position and so this position is not present)
  MISC_FEATURE (85)..(85): Xaa at this position is a single (one, 1) amino acid (or lack thereof) selected from the following options: Gly Pro or is absent (no amino acid at this position and so this position is not present)
IEKVXXSIENEXXKKLAALQEKARARFYREEEAQXKKGFAGGADRIAGASSFGRAQMTRVGWVGLWTRAALATVAMXRRRRRRRX

SEQ ID NO: 363 - protein, 81 aa, Artificial Sequence
  Designed; as detailed elsewhere in present application
  MISC_FEATURE (1)..(81): These amino acids are D-amino acids
  MISC_FEATURE (5)..(5): Xaa at this position is a single (one, 1) amino acid selected from the following options: His Ala
  MISC_FEATURE (6)..(6): Xaa at this position is a single (one, 1) amino acid selected from the following options: His Ala
  MISC_FEATURE (12)..(12): Xaa at this position is a single (one, 1) amino acid selected from the following options: His Lys Ala
  MISC_FEATURE (13)..(13): Xaa at this position is a single (one, 1) amino acid selected from the following options: His Tyr Ala
  MISC_FEATURE (35)..(35): Xaa at this position is a single (one, 1) amino acid selected from the following options: Glu Gln Ala
  MISC_FEATURE (73)..(73): Xaa at this position is a single (one, 1) amino acid (or lack thereof) selected from the following options: Gly Pro or is absent (no amino acid at this position and so this position is not present)
  MISC_FEATURE (81)..(81): Xaa at this position is a single (one, 1) amino acid (or lack thereof) selected from the following options: Gly Pro or is absent (no amino acid at this position and so this position is not present)
IEKVXXSIENEXXKKLAALQEKARARFYREEEAQXKKGFAGGADRIAFGRAQMTRVGWVGLWTRAALATVAMXRRRRRRRX

SEQ ID NO: 364 - protein, 68 aa, Artificial Sequence
  Designed; as detailed elsewhere in present application
  MISC_FEATURE (1)..(68): These amino acids are D-amino acids
  MISC_FEATURE (22)..(22): Xaa at this position is a single (one, 1) amino acid selected from the following options: Glu Gln Ala
  MISC_FEATURE (60)..(60): Xaa at this position is a single (one, 1) amino acid (or lack thereof) selected from the following options: Gly Pro or is absent (no amino acid at this position and so this position is not present)
  MISC_FEATURE (68)..(68): Xaa at this position is a single (one, 1) amino acid (or lack thereof) selected from the following options: Gly Pro or is absent (no amino acid at this position and so this position is not present)
KKLAALQEKARARFYREEEAQXKKGFAGGADRIAFGRAQMTRVGWVGLWTRAALATVAMXRRRRRRRX

SEQ ID NO: 365 - protein, 51 aa, Artificial Sequence
  Designed; as detailed elsewhere in present application
  MISC_FEATURE (1)..(51): These amino acids are D-amino acids
  MISC_FEATURE (43)..(43): Xaa at this position is a single (one, 1) amino acid (or lack thereof) selected from the following options: Gly Pro or is absent (no amino acid at this position and so this position is not present)
  MISC_FEATURE (51)..(51): Xaa at this position is a single (one, 1) amino acid (or lack thereof) selected from the following options: Gly Pro or is absent (no amino acid at this position and so this position is not present)
KVHHSIENEHHKKLAALFGRAQMTRVGWVGLWTRAALATVAMXRRRRRRRX

SEQ ID NO: 366 - protein, 85 aa, Artificial Sequence
  Designed; as detailed elsewhere in present application
  MISC_FEATURE (1)..(85): These amino acids are D-amino acids
  MISC_FEATURE (5)..(5): Xaa at this position is a single (one, 1) amino acid selected from the following options: His Ala
  MISC_FEATURE (6)..(6): Xaa at this position is a single (one, 1) amino acid selected from the following options: His Ala
  MISC_FEATURE (12)..(12): Xaa at this position is a single (one, 1) amino acid selected from the following options: His Lys Ala
  MISC_FEATURE (13)..(13): Xaa at this position is a single (one, 1) amino acid selected from the following options: His Tyr Ala
  MISC_FEATURE (35)..(35): Xaa at this position is a single (one, 1) amino acid selected from the following options: Glu Gln Ala
  MISC_FEATURE (47)..(47): Xaa at this position is a single (one, 1) amino acid selected from the following options: Thr Ala
  MISC_FEATURE (77)..(77): Xaa at this position is a single (one, 1) amino acid (or lack thereof) selected from the following options: Gly Pro or is absent (no amino acid at this position and so this position is not present)
  MISC_FEATURE (85)..(85): Xaa at this position is a single (one, 1) amino acid (or lack thereof) selected from the following options: Gly Pro or is absent (no amino acid at this position and so this position is not present)
IEKVXXSIENEXXKKLAALQEKARARLYREGKAQXRKRFDVGANWVXAESSFGRAQMTRVGWVGLWTRAALATVAMXRRRRRRRX

SEQ ID NO: 367 - protein, 81 aa, Artificial Sequence
  Designed; as detailed elsewhere in present application
  MISC_FEATURE (1)..(81): These amino acids are D-amino acids
  MISC_FEATURE (5)..(5): Xaa at this position is a single (one, 1) amino acid selected from the following options: His Ala
  MISC_FEATURE (6)..(6): Xaa at this position is a single (one, 1) amino acid selected from the following options: His Ala
  MISC_FEATURE (12)..(12): Xaa at this position is a single (one, 1) amino acid selected from the following options: His Lys Ala
  MISC_FEATURE (13)..(13): Xaa at this position is a single (one, 1) amino acid selected from the following options: His Tyr Ala
  MISC_FEATURE (35)..(35): Xaa at this position is a single (one, 1) amino acid selected from the following options: Glu Gln Ala
  MISC_FEATURE (47)..(47): Xaa at this position is a single (one, 1) amino acid selected from the following options: Thr Ala
  MISC_FEATURE (73)..(73): Xaa at this position is a single (one, 1) amino acid (or lack thereof) selected from the following options: Gly Pro or is absent (no amino acid at this position and so this position is not present)
  MISC_FEATURE (81)..(81): Xaa at this position is a single (one, 1) amino acid (or lack thereof) selected from the following options: Gly Pro or is absent (no amino acid at this position and so this position is not present)
IEKVXXSIENEXXKKLAALQEKARARLYREGKAQXRKRFDVGANWVXFGRAQMTRVGWVGLWTRAALATVAMXRRRRRRRX

SEQ ID NO: 368 - protein, 68 aa, Artificial Sequence
  Designed; as detailed elsewhere in present application
  MISC_FEATURE (1)..(68): These amino acids are D-amino acids
  MISC_FEATURE (22)..(22): Xaa at this position is a single (one, 1) amino acid selected from the following options: Glu Gln Ala
  MISC_FEATURE (34)..(34): Xaa at this position is a single (one, 1) amino acid selected from the following options: Thr Ala
  MISC_FEATURE (60)..(60): Xaa at this position is a single (one, 1) amino acid (or lack thereof) selected from the following options: Gly Pro or is absent (no amino acid at this position and so this position is not present)
  MISC_FEATURE (68)..(68): Xaa at this position is a single (one, 1) amino acid (or lack thereof) selected from the following options: Gly Pro or is absent (no amino acid at this position and so this position is not present)
KKLAALQEKARARLYREGKAQXRKRFDVGANWVXFGRAQMTRVGWVGLWTRAALATVAMXRRRRRRRX

SEQ ID NO: 369 - protein, 51 aa, Artificial Sequence; identical to SEQ ID NO: 365
  Designed; as detailed elsewhere in present application
  MISC_FEATURE (1)..(51): These amino acids are D-amino acids
  MISC_FEATURE (43)..(43): Xaa at this position is a single (one, 1) amino acid (or lack thereof) selected from the following options: Gly Pro or is absent (no amino acid at this position and so this position is not present)
  MISC_FEATURE (51)..(51): Xaa at this position is a single (one, 1) amino acid (or lack thereof) selected from the following options: Gly Pro or is absent (no amino acid at this position and so this position is not present)

SEQ ID NO: 370 - protein, 85 aa, Artificial Sequence
  Designed; as detailed elsewhere in present application
  MISC_FEATURE (1)..(85): These amino acids are D-amino acids
  MISC_FEATURE (5)..(5): Xaa at this position is a single (one, 1) amino acid selected from the following options: His Ala
  MISC_FEATURE (6)..(6): Xaa at this position is a single (one, 1) amino acid selected from the following options: His Ala
  MISC_FEATURE (12)..(12): Xaa at this position is a single (one, 1) amino acid selected from the following options: His Lys Ala
  MISC_FEATURE (13)..(13): Xaa at this position is a single (one, 1) amino acid selected from the following options: His Tyr Ala
  MISC_FEATURE (35)..(35): Xaa at this position is a single (one, 1) amino acid selected from the following options: Glu Gln Ala
  MISC_FEATURE (47)..(47): Xaa at this position is a single (one, 1) amino acid selected from the following options: Ser Ala
  MISC_FEATURE (77)..(77): Xaa at this position is a single (one, 1) amino acid (or lack thereof) selected from the following options: Gly Pro or is absent (no amino acid at this position and so this position is not present)
  MISC_FEATURE (85)..(85): Xaa at this position is a single (one, 1) amino acid (or lack thereof) selected from the following options: Gly Pro or is absent (no amino acid at this position and so this position is not present)
IAKKXXYIEDEXXKKLAELQEKTKQRFFREEEAQXRKGFAGGADRIXGSSSFGRAQMTRVGWVGLWTRAALATVAMXRRRRRRRX

SEQ ID NO: 371 - protein, 81 aa, Artificial Sequence
  Designed; as detailed elsewhere in present application
  MISC_FEATURE (1)..(81): These amino acids are D-amino acids
  MISC_FEATURE (5)..(5): Xaa at this position is a single (one, 1) amino acid selected from the following options: His Ala
  MISC_FEATURE (6)..(6): Xaa at this position is a single (one, 1) amino acid selected from the following options: His Ala
  MISC_FEATURE (12)..(12): Xaa at this position is a single (one, 1) amino acid selected from the following options: His Lys Ala
  MISC_FEATURE (13)..(13): Xaa at this position is a single (one, 1) amino acid selected from the following options: His Tyr Ala
  MISC_FEATURE (35)..(35): Xaa at this position is a single (one, 1) amino acid selected from the following options: Glu Gln Ala
  MISC_FEATURE (47)..(47): Xaa at this position is a single (one, 1) amino acid selected from the following options: Ser Ala
  MISC_FEATURE (73)..(73): Xaa at this position is a single (one, 1) amino acid (or lack thereof) selected from the following options: Gly Pro or is absent (no amino acid at this position and so this position is not present)
  MISC_FEATURE (81)..(81): Xaa at this position is a single (one, 1) amino acid (or lack thereof) selected from the following options: Gly Pro or is absent (no amino acid at this position and so this position is not present)
IAKKXXYIEDEXXKKLAELQEKTKQRFFREEEAQXRKGFAGGADRIXFGRAQMTRVGWVGLWTRAALATVAMXRRRRRRRX

SEQ ID NO: 372 - protein, 68 aa, Artificial Sequence
  Designed; as detailed elsewhere in present application
  MISC_FEATURE (1)..(68): These amino acids are D-amino acids
  MISC_FEATURE (22)..(22): Xaa at this position is a single (one, 1) amino acid selected from the following options: Glu Gln Ala
  MISC_FEATURE (34)..(34): Xaa at this position is a single (one, 1) amino acid selected from the following options: Ser Ala
  MISC_FEATURE (60)..(60): Xaa at this position is a single (one, 1) amino acid (or lack thereof) selected from the following options: Gly Pro or is absent (no amino acid at this position and so this position is not present)
  MISC_FEATURE (68)..(68): Xaa at this position is a single (one, 1) amino acid (or lack thereof) selected from the following options: Gly Pro or is absent (no amino acid at this position and so this position is not present)
KKLAELQEKTKQRFFREEEAQXRKGFAGGADRIXFGRAQMTRVGWVGLWTRAALATVAMXRRRRRRRX

SEQ ID NO: 373 - protein, 51 aa, Artificial Sequence
  Designed; as detailed elsewhere in present application
  MISC_FEATURE (1)..(51): These amino acids are D-amino acids
  MISC_FEATURE (43)..(43): Xaa at this position is a single (one, 1) amino acid (or lack thereof) selected from the following options: Gly Pro or is absent (no amino acid at this position and so this position is not present)
  MISC_FEATURE (51)..(51): Xaa at this position is a single (one, 1) amino acid (or lack thereof) selected from the following options: Gly Pro or is absent (no amino acid at this position and so this position is not present)
KKHHYIEDEHHKKLAELFGRAQMTRVGWVGLWTRAALATVAMXRRRRRRRX

SEQ ID NO: 374 - protein, 85 aa, Artificial Sequence
  Designed; as detailed elsewhere in present application
  MISC_FEATURE (1)..(85): These amino acids are D-amino acids
  MISC_FEATURE (5)..(5): Xaa at this position is a single (one, 1) amino acid selected from the following options: His Ala
  MISC_FEATURE (6)..(6): Xaa at this position is a single (one, 1) amino acid selected from the following options: His Ala
  MISC_FEATURE (12)..(12): Xaa at this position is a single (one, 1) amino acid selected from the following options: His Lys Ala
  MISC_FEATURE (13)..(13): Xaa at this position is a single (one, 1) amino acid selected from the following options: His Tyr Ala
  MISC_FEATURE (35)..(35): Xaa at this position is a single (one, 1) amino acid selected from the following options: Glu Gln Ala
  MISC_FEATURE (77)..(77): Xaa at this position is a single (one, 1) amino acid (or lack thereof) selected from the following options: Gly Pro or is absent (no amino acid at this position and so this position is not present)
  MISC_FEATURE (85)..(85): Xaa at this position is a single (one, 1) amino acid (or lack thereof) selected from the following options: Gly Pro or is absent (no amino acid at this position and so this position is not present)
IEKAXXSIENEXXKKLAALQEKARARFYREEEAQXRKGFAGGADRVAGASSFGRTQLVKMGWVGFRARVALASGAMXRRRRRRRX

SEQ ID NO: 375 - protein, 81 aa, Artificial Sequence
  Designed; as detailed elsewhere in present application
  MISC_FEATURE (1)..(81): These amino acids are D-amino acids
  MISC_FEATURE (5)..(5): Xaa at this position is a single (one, 1) amino acid selected from the following options: His Ala
  MISC_FEATURE (6)..(6): Xaa at this position is a single (one, 1) amino acid selected from the following options: His Ala
  MISC_FEATURE (12)..(12): Xaa at this position is a single (one, 1) amino acid selected from the following options: His Lys Ala
  MISC_FEATURE (13)..(13): Xaa at this position is a single (one, 1) amino acid selected from the following options: His Tyr Ala
  MISC_FEATURE (35)..(35): Xaa at this position is a single (one, 1) amino acid selected from the following options: Glu Gln Ala
  MISC_FEATURE (73)..(73): Xaa at this position is a single (one, 1) amino acid (or lack thereof) selected from the following options: Gly Pro or is absent (no amino acid at this position and so this position is not present)
  MISC_FEATURE (81)..(81): Xaa at this position is a single (one, 1) amino acid (or lack thereof) selected from the following options: Gly Pro or is absent (no amino acid at this position and so this position is not present)
IEKAXXSIENEXXKKLAALQEKARARFYREEEAQXRKGFAGGADRVAFGRTQLVKMGWVGFRARVALASGAMXRRRRRRRX

SEQ ID NO: 376 - protein, 68 aa, Artificial Sequence
  Designed; as detailed elsewhere in present application
  MISC_FEATURE (1)..(68): These amino acids are D-amino acids
  MISC_FEATURE (22)..(22): Xaa at this position is a single (one, 1) amino acid selected from the following options: Glu Gln Ala
  MISC_FEATURE (60)..(60): Xaa at this position is a single (one, 1) amino acid (or lack thereof) selected from the following options: Gly Pro or is absent (no amino acid at this position and so this position is not present)
  MISC_FEATURE (68)..(68): Xaa at this position is a single (one, 1) amino acid (or lack thereof) selected from the following options: Gly Pro or is absent (no amino acid at this position and so this position is not present)
KKLAALQEKARARFYREEEAQXRKGFAGGADRVAFGRTQLVKMGWVGFRARVALASGAMXRRRRRRRX

SEQ ID NO: 377 - protein, 51 aa, Artificial Sequence
  Designed; as detailed elsewhere in present application
  MISC_FEATURE (1)..(51): These amino acids are D-amino acids
  MISC_FEATURE (43)..(43): Xaa at this position is a single (one, 1) amino acid (or lack thereof) selected from the following options: Gly Pro or is absent (no amino acid at this position and so this position is not present)
  MISC_FEATURE (51)..(51): Xaa at this position is a single (one, 1) amino acid (or lack thereof) selected from the following options: Gly Pro or is absent (no amino acid at this position and so this position is not present)
KAHHSIENEHHKKLAALFGRTQLVKMGWVGFRARVALASGAMXRRRRRRRX

SEQ ID NO: 378 - protein, 85 aa, Artificial Sequence
  Designed; as detailed elsewhere in present application
  MISC_FEATURE (1)..(85): These amino acids are D-amino acids
  MISC_FEATURE (5)..(5): Xaa at this position is a single (one, 1) amino acid selected from the following options: His Ala
  MISC_FEATURE (6)..(6): Xaa at this position is a single (one, 1) amino acid selected from the following options: His Ala
  MISC_FEATURE (12)..(12): Xaa at this position is a single (one, 1) amino acid selected from the following options: His Lys Ala
  MISC_FEATURE (13)..(13): Xaa at this position is a single (one, 1) amino acid selected from the following options: His Tyr Ala
  MISC_FEATURE (35)..(35): Xaa at this position is a single (one, 1) amino acid selected from the following options: Glu Gln Ala
  MISC_FEATURE (47)..(47): Xaa at this position is a single (one, 1) amino acid selected from the following options: Ser Ala
  MISC_FEATURE (77)..(77): Xaa at this position is a single (one, 1) amino acid (or lack thereof) selected from the following options: Gly Pro or is absent (no amino acid at this position and so this position is not present)
  MISC_FEATURE (85)..(85): Xaa at this position is a single (one, 1) amino acid (or lack thereof) selected from the following options: Gly Pro or is absent (no amino acid at this position and so this position is not present)
IEKKXXVIEEEXXKKLAALQERSQARFYREEEAQXRKGFAGGAERIXGAGRFGRTQLVKMGWVGFRARVALASGAMXRRRRRRRX

SEQ ID NO: 379 - protein, 81 aa, Artificial Sequence
  Designed; as detailed elsewhere in present application
  MISC_FEATURE (1)..(81): These amino acids are D-amino acids
  MISC_FEATURE (5)..(5): Xaa at this position is a single (one, 1) amino acid selected from the following options: His Ala
  MISC_FEATURE (6)..(6): Xaa at this position is a single (one, 1) amino acid selected from the following options: His Ala
  MISC_FEATURE (12)..(12): Xaa at this position is a single (one, 1) amino acid selected from the following options: His Lys Ala
  MISC_FEATURE (13)..(13): Xaa at this position is a single (one, 1) amino acid selected from the following options: His Tyr Ala
  MISC_FEATURE (35)..(35): Xaa at this position is a single (one, 1) amino acid selected from the following options: Glu Gln Ala
  MISC_FEATURE (47)..(47): Xaa at this position is a single (one, 1) amino acid selected from the following options: Ser Ala
  MISC_FEATURE (73)..(73): Xaa at this position is a single (one, 1) amino acid (or lack thereof) selected from the following options: Gly Pro or is absent (no amino acid at this position and so this position is not present)
  MISC_FEATURE (81)..(81): Xaa at this position is a single (one, 1) amino acid (or lack thereof) selected from the following options: Gly Pro or is absent (no amino acid at this position and so this position is not present)
IEKKXXVIEEEXXKKLAALQERSQARFYREEEAQXRKGFAGGAERIXFGRTQLVKMGWVGFRARVALASGAMXRRRRRRRX

SEQ ID NO: 380 - protein, 68 aa, Artificial Sequence
  Designed; as detailed elsewhere in present application
  MISC_FEATURE (1)..(68): These amino acids are D-amino acids
  MISC_FEATURE (22)..(22): Xaa at this position is a single (one, 1) amino acid selected from the following options: Glu Gln Ala
  MISC_FEATURE (34)..(34): Xaa at this position is a single (one, 1) amino acid selected from the following options: Ser Ala
  MISC_FEATURE (60)..(60): Xaa at this position is a single (one, 1) amino acid (or lack thereof) selected from the following options: Gly Pro or is absent (no amino acid at this position and so this position is not present)
  MISC_FEATURE (68)..(68): Xaa at this position is a single (one, 1) amino acid (or lack thereof) selected from the following options: Gly Pro or is absent (no amino acid at this position and so this position is not present)
KKLAALQERSQARFYREEEAQXRKGFAGGAERIXFGRTQLVKMGWVGFRARVALASGAMXRRRRRRRX

SEQ ID NO: 381 - protein, 51 aa, Artificial Sequence
  Designed; as detailed elsewhere in present application
  MISC_FEATURE (1)..(51): These amino acids are D-amino acids
  MISC_FEATURE (43)..(43): Xaa at this position is a single (one, 1) amino acid (or lack thereof) selected from the following options: Gly Pro or is absent (no amino acid at this position and so this position is not present)
  MISC_FEATURE (51)..(51): Xaa at this position is a single (one, 1) amino acid (or lack thereof) selected from the following options: Gly Pro or is absent (no amino acid at this position and so this position is not present)
KKHHVIEEEHHKKLAALFGRTQLVKMGWVGFRARVALASGAMXRRRRRRRX

SEQ ID NO: 382 - protein, 85 aa, Artificial Sequence
  Designed; as detailed elsewhere in present application
  MISC_FEATURE (1)..(85): These amino acids are D-amino acids
  MISC_FEATURE (5)..(5): Xaa at this position is a single (one, 1) amino acid selected from the following options: His Ala
  MISC_FEATURE (6)..(6): Xaa at this position is a single (one, 1) amino acid selected from the following options: His Ala
  MISC_FEATURE (12)..(12): Xaa at this position is a single (one, 1) amino acid selected from the following options: His Lys Ala
  MISC_FEATURE (13)..(13): Xaa at this position is a single (one, 1) amino acid selected from the following options: His Tyr Ala
  MISC_FEATURE (35)..(35): Xaa at this position is a single (one, 1) amino acid selected from the following options: Glu Gln Ala
  MISC_FEATURE (77)..(77): Xaa at this position is a single (one, 1) amino acid (or lack thereof) selected from the following options: Gly Pro or is absent (no amino acid at this position and so this position is not present)
  MISC_FEATURE (85)..(85): Xaa at this position is a single (one, 1) amino acid (or lack thereof) selected from the following options: Gly Pro or is absent (no amino acid at this position and so this position is not present)
IEKVXXSIENEXXKKLAALQEKARARFYREEEAQXKKGFAGGADRIAGASSFGRTQLVKMGWVGFRARVALASGAMXRRRRRRRX

SEQ ID NO: 383 - protein, 81 aa, Artificial Sequence
  Designed; as detailed elsewhere in present application
  MISC_FEATURE (1)..(81): These amino acids are D-amino acids
  MISC_FEATURE (5)..(5): Xaa at this position is a single (one, 1) amino acid selected from the following options: His Ala
  MISC_FEATURE (6)..(6): Xaa at this position is a single (one, 1) amino acid selected from the following options: His Ala
  MISC_FEATURE (12)..(12): Xaa at this position is a single (one, 1) amino acid selected from the following options: His Lys Ala
  MISC_FEATURE (13)..(13): Xaa at this position is a single (one, 1) amino acid selected from the following options: His Tyr Ala
  MISC_FEATURE (35)..(35): Xaa at this position is a single (one, 1) amino acid selected from the following options: Glu Gln Ala
  MISC_FEATURE (73)..(73): Xaa at this position is a single (one, 1) amino acid (or lack thereof) selected from the following options: Gly Pro or is absent (no amino acid at this position and so this position is not present)
  MISC_FEATURE (81)..(81): Xaa at this position is a single (one, 1) amino acid (or lack thereof) selected from the following options: Gly Pro or is absent (no amino acid at this position and so this position is not present)
IEKVXXSIENEXXKKLAALQEKARARFYREEEAQXKKGFAGGADRIAFGRTQLVKMGWVGFRARVALASGAMXRRRRRRRX

SEQ ID NO: 384 - protein, 68 aa, Artificial Sequence
  Designed; as detailed elsewhere in present application
  MISC_FEATURE (1)..(68): These amino acids are D-amino acids
  MISC_FEATURE (22)..(22): Xaa at this position is a single (one, 1) amino acid selected from the following options: Glu Gln Ala
  MISC_FEATURE (60)..(60): Xaa at this position is a single (one, 1) amino acid (or lack thereof) selected from the following options: Gly Pro or is absent (no amino acid at this position and so this position is not present)
  MISC_FEATURE (68)..(68): Xaa at this position is a single (one, 1) amino acid (or lack thereof) selected from the following options: Gly Pro or is absent (no amino acid at this position and so this position is not present)
KKLAALQEKARARFYREEEAQXKKGFAGGADRIAFGRTQLVKMGWVGFRARVALASGAMXRRRRRRRX

SEQ ID NO: 385 - protein, 51 aa, Artificial Sequence
  Designed; as detailed elsewhere in present application
  MISC_FEATURE (1)..(51): These amino acids are D-amino acids
  MISC_FEATURE (43)..(43): Xaa at this position is a single (one, 1) amino acid (or lack thereof) selected from the following options: Gly Pro or is absent (no amino acid at this position and so this position is not present)
  MISC_FEATURE (51)..(51): Xaa at this position is a single (one, 1) amino acid (or lack thereof) selected from the following options: Gly Pro or is absent (no amino acid at this position and so this position is not present)
KVHHSIENEHHKKLAALFGRTQLVKMGWVGFRARVALASGAMXRRRRRRRX

SEQ ID NO: 386 - protein, 85 aa, Artificial Sequence
  Designed; as detailed elsewhere in present application
  MISC_FEATURE (1)..(85): These amino acids are D-amino acids
  MISC_FEATURE (5)..(5): Xaa at this position is a single (one, 1) amino acid selected from the following options: His Ala
  MISC_FEATURE (6)..(6): Xaa at this position is a single (one, 1) amino acid selected from the following options: His Ala
  MISC_FEATURE (12)..(12): Xaa at this position is a single (one, 1) amino acid selected from the following options: His Lys Ala
  MISC_FEATURE (13)..(13): Xaa at this position is a single (one, 1) amino acid selected from the following options: His Tyr Ala
  MISC_FEATURE (35)..(35): Xaa at this position is a single (one, 1) amino acid selected from the following options: Glu Gln Ala
  MISC_FEATURE (47)..(47): Xaa at this position is a single (one, 1) amino acid selected from the following options: Thr Ala
  MISC_FEATURE (77)..(77): Xaa at this position is a single (one, 1) amino acid (or lack thereof) selected from the following options: Gly Pro or is absent (no amino acid at this position and so this position is not present)
  MISC_FEATURE (85)..(85): Xaa at this position is a single (one, 1) amino acid (or lack thereof) selected from the following options: Gly Pro or is absent (no amino acid at this position and so this position is not present)
IEKVXXSIENEXXKKLAALQEKARARLYREGKAQXRKRFDVGANWVXAESSFGRTQLVKMGWVGFRARVALASGAMXRRRRRRRX

SEQ ID NO: 387 - protein, 81 aa, Artificial Sequence
  Designed; as detailed elsewhere in present application
  MISC_FEATURE (1)..(81): These amino acids are D-amino acids
  MISC_FEATURE (5)..(5): Xaa at this position is a single (one, 1) amino acid selected from the following options: His Ala
  MISC_FEATURE (6)..(6): Xaa at this position is a single (one, 1) amino acid selected from the following options: His Ala
  MISC_FEATURE (12)..(12): Xaa at this position is a single (one, 1) amino acid selected from the following options: His Lys Ala
  MISC_FEATURE (13)..(13): Xaa at this position is a single (one, 1) amino acid selected from the following options: His Tyr Ala
  MISC_FEATURE (35)..(35): Xaa at this position is a single (one, 1) amino acid selected from the following options: Glu Gln Ala
  MISC_FEATURE (47)..(47): Xaa at this position is a single (one, 1) amino acid selected from the following options: Thr Ala
  MISC_FEATURE (73)..(73): Xaa at this position is a single (one, 1) amino acid (or lack thereof) selected from the following options: Gly Pro or is absent (no amino acid at this position and so this position is not present)
  MISC_FEATURE (81)..(81): Xaa at this position is a single (one, 1) amino acid (or lack thereof) selected from the following options: Gly Pro or is absent (no amino acid at this position and so this position is not present)
IEKVXXSIENEXXKKLAALQEKARARLYREGKAQXRKRFDVGANWVXFGRTQLVKMGWVGFRARVALASGAMXRRRRRRRX

SEQ ID NO: 388 - protein, 68 aa, Artificial Sequence
  Designed; as detailed elsewhere in present application
  MISC_FEATURE (1)..(68): These amino acids are D-amino acids
  MISC_FEATURE (22)..(22): Xaa at this position is a single (one, 1) amino acid selected from the following options: Glu Gln Ala
  MISC_FEATURE (34)..(34): Xaa at this position is a single (one, 1) amino acid selected from the following options: Thr Ala
  MISC_FEATURE (60)..(60): Xaa at this position is a single (one, 1) amino acid (or lack thereof) selected from the following options: Gly Pro or is absent (no amino acid at this position and so this position is not present)
  MISC_FEATURE (68)..(68): Xaa at this position is a single (one, 1) amino acid (or lack thereof) selected from the following options: Gly Pro or is absent (no amino acid at this position and so this position is not present)
KKLAALQEKARARLYREGKAQXRKRFDVGANWVXFGRTQLVKMGWVGFRARVALASGAMXRRRRRRRX

SEQ ID NO: 389 - protein, 51 aa, Artificial Sequence; identical to SEQ ID NO: 385
  Designed; as detailed elsewhere in present application
  MISC_FEATURE (1)..(51): These amino acids are D-amino acids
  MISC_FEATURE (43)..(43): Xaa at this position is a single (one, 1) amino acid (or lack thereof) selected from the following options: Gly Pro or is absent (no amino acid at this position and so this position is not present)
  MISC_FEATURE (51)..(51): Xaa at this position is a single (one, 1) amino acid (or lack thereof) selected from the following options: Gly Pro or is absent (no amino acid at this position and so this position is not present)

SEQ ID NO: 390 - protein, 85 aa, Artificial Sequence
  Designed; as detailed elsewhere in present application
  MISC_FEATURE (1)..(85): These amino acids are D-amino acids
  MISC_FEATURE (5)..(5): Xaa at this position is a single (one, 1) amino acid selected from the following options: His Ala
  MISC_FEATURE (6)..(6): Xaa at this position is a single (one, 1) amino acid selected from the following options: His Ala
  MISC_FEATURE (12)..(12): Xaa at this position is a single (one, 1) amino acid selected from the following options: His Lys Ala
  MISC_FEATURE (13)..(13): Xaa at this position is a single (one, 1) amino acid selected from the following options: His Tyr Ala
  MISC_FEATURE (35)..(35): Xaa at this position is a single (one, 1) amino acid selected from the following options: Glu Gln Ala
  MISC_FEATURE (47)..(47): Xaa at this position is a single (one, 1) amino acid selected from the following options: Ser Ala
  MISC_FEATURE (77)..(77): Xaa at this position is a single (one, 1) amino acid (or lack thereof) selected from the following options: Gly Pro or is absent (no amino acid at this position and so this position is not present)
  MISC_FEATURE (85)..(85): Xaa at this position is a single (one, 1) amino acid (or lack thereof) selected from the following options: Gly Pro or is absent (no amino acid at this position and so this position is not present)
IAKKXXYIEDEXXKKLAELQEKTKQRFFREEEAQXRKGFAGGADRIXGSSSFGRTQLVKMGWVGFRARVALASGAMXRRRRRRRX

SEQ ID NO: 391 - protein, 81 aa, Artificial Sequence
  Designed; as detailed elsewhere in present application
  MISC_FEATURE (1)..(81): These amino acids are D-amino acids
  MISC_FEATURE (5)..(5): Xaa at this position is a single (one, 1) amino acid selected from the following options: His Ala
  MISC_FEATURE (6)..(6): Xaa at this position is a single (one, 1) amino acid selected from the following options: His Ala
  MISC_FEATURE (12)..(12): Xaa at this position is a single (one, 1) amino acid selected from the following options: His Lys Ala
  MISC_FEATURE (13)..(13): Xaa at this position is a single (one, 1) amino acid selected from the following options: His Tyr Ala
  MISC_FEATURE (35)..(35): Xaa at this position is a single (one, 1) amino acid selected from the following options: Glu Gln Ala
  MISC_FEATURE (47)..(47): Xaa at this position is a single (one, 1) amino acid selected from the following options: Ser Ala
  MISC_FEATURE (73)..(73): Xaa at this position is a single (one, 1) amino acid (or lack thereof) selected from the following options: Gly Pro or is absent (no amino acid at this position and so this position is not present)
  MISC_FEATURE (81)..(81): Xaa at this position is a single (one, 1) amino acid (or lack thereof) selected from the following options: Gly Pro or is absent (no amino acid at this position and so this position is not present)
IAKKXXYIEDEXXKKLAELQEKTKQRFFREEEAQXRKGFAGGADRIXFGRTQLVKMGWVGFRARVALASGAMXRRRRRRRX

SEQ ID NO: 392 - protein, 68 aa, Artificial Sequence
  Designed; as detailed elsewhere in present application
  MISC_FEATURE (1)..(68): These amino acids are D-amino acids
  MISC_FEATURE (22)..(22): Xaa at this position is a single (one, 1) amino acid selected from the following options: Glu Gln Ala
  MISC_FEATURE (34)..(34): Xaa at this position is a single (one, 1) amino acid selected from the following options: Ser Ala
  MISC_FEATURE (60)..(60): Xaa at this position is a single (one, 1) amino acid (or lack thereof) selected from the following options: Gly Pro or is absent (no amino acid at this position and so this position is not present)
  MISC_FEATURE (68)..(68): Xaa at this position is a single (one, 1) amino acid (or lack thereof) selected from the following options: Gly Pro or is absent (no amino acid at this position and so this position is not present)
KKLAELQEKTKQRFFREEEAQXRKGFAGGADRIXFGRTQLVKMGWVGFRARVALASGAMXRRRRRRRX

SEQ ID NO: 393 - protein, 51 aa, Artificial Sequence
  Designed; as detailed elsewhere in present application
  MISC_FEATURE (1)..(51): These amino acids are D-amino acids
  MISC_FEATURE (43)..(43): Xaa at this position is a single (one, 1) amino acid (or lack thereof) selected from the following options: Gly Pro or is absent (no amino acid at this position and so this position is not present)
  MISC_FEATURE (51)..(51): Xaa at this position is a single (one, 1) amino acid (or lack thereof) selected from the following options: Gly Pro or is absent (no amino acid at this position and so this position is not present)
KKHHYIEDEHHKKLAELFGRTQLVKMGWVGFRARVALASGAMXRRRRRRRX

SEQ ID NO: 394 - protein, 89 aa, Artificial Sequence
  Designed; as detailed elsewhere in present application
  MISC_FEATURE (1)..(1): Xaa at this position is a single (one, 1) amino acid (or lack thereof) selected from the following options: Gly Pro or is absent (no amino acid at this position and so this position is not present)
  MISC_FEATURE (1)..(13): These amino acids are D-amino acids
  MISC_FEATURE (11)..(11): Xaa at this position is a single (one, 1) amino acid (or lack thereof) selected from the following options: Gly or is absent (no amino acid at this position and so this position is not present)
  MISC_FEATURE (12)..(12): Xaa at this position is a single (one, 1) amino acid (or lack thereof) selected from the following options: Tyr or is absent (no amino acid at this position and so this position is not present)
  MISC_FEATURE (13)..(13): Xaa at this position is a single (one, 1) amino acid (or lack thereof) selected from the following options: Gly Pro or is absent (no amino acid at this position and so this position is not present)
  MISC_FEATURE (39)..(89): These amino acids are D-amino acids
  MISC_FEATURE (43)..(43): Xaa at this position is a single (one, 1) amino acid selected from the following options: His Ala
  MISC_FEATURE (44)..(44): Xaa at this position is a single (one, 1) amino acid selected from the following options: His Ala
  MISC_FEATURE (50)..(50): Xaa at this position is a single (one, 1) amino acid selected from the following options: His Lys Ala
  MISC_FEATURE (51)..(51): Xaa at this position is a single (one, 1) amino acid selected from the following options: His Tyr Ala
  MISC_FEATURE (73)..(73): Xaa at this position is a single (one, 1) amino acid selected from the following options: Glu Gln Ala
XRRRQRRKKRXXXMAVTALAARTWLGVWGVRTMQARGFIEKAXXSIENEXXKKLAALQEKARARFYREEEAQXRKGFAGGADRVAGASS

SEQ ID NO: 395 - protein, 72 aa, Artificial Sequence
  Designed; as detailed elsewhere in present application
  MISC_FEATURE (1)..(1): Xaa at this position is a single (one, 1) amino acid (or lack thereof) selected from the following options: Gly Pro or is absent (no amino acid at this position and so this position is not present)
  MISC_FEATURE (1)..(13): These amino acids are D-amino acids
  MISC_FEATURE (11)..(11): Xaa at this position is a single (one, 1) amino acid (or lack thereof) selected from the following options: Gly or is absent (no amino acid at this position and so this position is not present)
  MISC_FEATURE (12)..(12): Xaa at this position is a single (one, 1) amino acid (or lack thereof) selected from the following options: Tyr or is absent (no amino acid at this position and so this position is not present)
  MISC_FEATURE (13)..(13): Xaa at this position is a single (one, 1) amino acid (or lack thereof) selected from the following options: Gly Pro or is absent (no amino acid at this position and so this position is not present)
  MISC_FEATURE (39)..(72): These amino acids are D-amino acids
  MISC_FEATURE (60)..(60): Xaa at this position is a single (one, 1) amino acid selected from the following options: Glu Gln Ala
XRRRQRRKKRXXXMAVTALAARTWLGVWGVRTMQARGFKKLAALQEKARARFYREEEAQXRKGFAGGADRVA

SEQ ID NO: 396 - protein, 55 aa, Artificial Sequence
  Designed; as detailed elsewhere in present application
  MISC_FEATURE (1)..(1): Xaa at this position is a single (one, 1) amino acid (or lack thereof) selected from the following options: Gly Pro or is absent (no amino acid at this position and so this position is not present)
  MISC_FEATURE (1)..(13): These amino acids are D-amino acids
  MISC_FEATURE (11)..(11): Xaa at this position is a single (one, 1) amino acid (or lack thereof) selected from the following options: Gly or is absent (no amino acid at this position and so this position is not present)
  MISC_FEATURE (12)..(12): Xaa at this position is a single (one, 1) amino acid (or lack thereof) selected from the following options: Tyr or is absent (no amino acid at this position and so this position is not present)
  MISC_FEATURE (13)..(13): Xaa at this position is a single (one, 1) amino acid (or lack thereof) selected from the following options: Gly Pro or is absent (no amino acid at this position and so this position is not present)
  MISC_FEATURE (39)..(55): These amino acids are D-amino acids
XRRRQRRKKRXXXMAVTALAARTWLGVWGVRTMQARGFKAHHSIENEHHKKLAAL

SEQ ID NO: 397 - protein, 89 aa, Artificial Sequence
  Designed; as detailed elsewhere in present application
  MISC_FEATURE (1)..(1): Xaa at this position is a single (one, 1) amino acid (or lack thereof) selected from the following options: Gly Pro or is absent (no amino acid at this position and so this position is not present)
  MISC_FEATURE (1)..(13): These amino acids are D-amino acids
  MISC_FEATURE (11)..(11): Xaa at this position is a single (one, 1) amino acid (or lack thereof) selected from the following options: Gly or is absent (no amino acid at this position and so this position is not present)
  MISC_FEATURE (12)..(12): Xaa at this position is a single (one, 1) amino acid (or lack thereof) selected from the following options: Tyr or is absent (no amino acid at this position and so this position is not present)
  MISC_FEATURE (13)..(13): Xaa at this position is a single (one, 1) amino acid (or lack thereof) selected from the following options: Gly Pro or is absent (no amino acid at this position and so this position is not present)
  MISC_FEATURE (39)..(89): These amino acids are D-amino acids
  MISC_FEATURE (43)..(43): Xaa at this position is a single (one, 1) amino acid selected from the following options: His Ala
  MISC_FEATURE (44)..(44): Xaa at this position is a single (one, 1) amino acid selected from the following options: His Ala
  MISC_FEATURE (50)..(50): Xaa at this position is a single (one, 1) amino acid selected from the following options: His Lys Ala
  MISC_FEATURE (51)..(51): Xaa at this position is a single (one, 1) amino acid selected from the following options: His Tyr Ala
  MISC_FEATURE (73)..(73): Xaa at this position is a single (one, 1) amino acid selected from the following options: Glu Gln Ala
  MISC_FEATURE (85)..(85): Xaa at this position is a single (one, 1) amino acid selected from the following options: Ser Ala
XRRRQRRKKRXXXMAVTALAARTWLGVWGVRTMQARGFIEKKXXVIEEEXXKKLAALQERSQARFYREEEAQXRKGFAGGAERIXGAGR

SEQ ID NO: 398 - protein, 72 aa, Artificial Sequence
  Designed; as detailed elsewhere in present application
  MISC_FEATURE (1)..(1): Xaa at this position is a single (one, 1) amino acid (or lack thereof) selected from the following options: Gly Pro or is absent (no amino acid at this position and so this position is not present)
  MISC_FEATURE (1)..(13): These amino acids are D-amino acids
  MISC_FEATURE (11)..(11): Xaa at this position is a single (one, 1) amino acid (or lack thereof) selected from the following options: Gly or is absent (no amino acid at this position and so this position is not present)
  MISC_FEATURE (12)..(12): Xaa at this position is a single (one, 1) amino acid (or lack thereof) selected from the following options: Tyr or is absent (no amino acid at this position and so this position is not present)
  MISC_FEATURE (13)..(13): Xaa at this position is a single (one, 1) amino acid (or lack thereof) selected from the following options: Gly Pro or is absent (no amino acid at this position and so this position is not present)
  MISC_FEATURE (39)..(72): These amino acids are D-amino acids
  MISC_FEATURE (60)..(60): Xaa at this position is a single (one, 1) amino acid selected from the following options: Glu Gln Ala
  MISC_FEATURE (72)..(72): Xaa at this position is a single (one, 1) amino acid selected from the following options: Ser Ala
XRRRQRRKKRXXXMAVTALAARTWLGVWGVRTMQARGFKKLAALQERSQARFYREEEAQXRKGFAGGAERIX

SEQ ID NO: 399 - protein, 55 aa, Artificial Sequence
  Designed; as detailed elsewhere in present application
  MISC_FEATURE (1)..(1): Xaa at this position is a single (one, 1) amino acid (or lack thereof) selected from the following options: Gly Pro or is absent (no amino acid at this position and so this position is not present)
  MISC_FEATURE (1)..(13): These amino acids are D-amino acids
  MISC_FEATURE (11)..(11): Xaa at this position is a single (one, 1) amino acid (or lack thereof) selected from the following options: Gly or is absent (no amino acid at this position and so this position is not present)
  MISC_FEATURE (12)..(12): Xaa at this position is a single (one, 1) amino acid (or lack thereof) selected from the following options: Tyr or is absent (no amino acid at this position and so this position is not present)
  MISC_FEATURE (13)..(13): Xaa at this position is a single (one, 1) amino acid (or lack thereof) selected from the following options: Gly Pro or is absent (no amino acid at this position and so this position is not present)
  MISC_FEATURE (39)..(55): These amino acids are D-amino acids
XRRRQRRKKRXXXMAVTALAARTWLGVWGVRTMQARGFKKHHVIEEEHHKKLAAL

SEQ ID NO: 400 - protein, 89 aa, Artificial Sequence
  Designed; as detailed elsewhere in present application
  MISC_FEATURE (1)..(1): Xaa at this position is a single (one, 1) amino acid (or lack thereof) selected from the following options: Gly Pro or is absent (no amino acid at this position and so this position is not present)
  MISC_FEATURE (1)..(13): These amino acids are D-amino acids
  MISC_FEATURE (11)..(11): Xaa at this position is a single (one, 1) amino acid (or lack thereof) selected from the following options: Gly or is absent (no amino acid at this position and so this position is not present)
  MISC_FEATURE (12)..(12): Xaa at this position is a single (one, 1) amino acid (or lack thereof) selected from the following options: Tyr or is absent (no amino acid at this position and so this position is not present)
  MISC_FEATURE (13)..(13): Xaa at this position is a single (one, 1) amino acid (or lack thereof) selected from the following options: Gly Pro or is absent (no amino acid at this position and so this position is not present)
  MISC_FEATURE (39)..(89): These amino acids are D-amino acids
  MISC_FEATURE (43)..(43): Xaa at this position is a single (one, 1) amino acid selected from the following options: His Ala
  MISC_FEATURE (44)..(44): Xaa at this position is a single (one, 1) amino acid selected from the following options: His Ala
  MISC_FEATURE (50)..(50): Xaa at this position is a single (one, 1) amino acid selected from the following options: His Lys Ala
  MISC_FEATURE (51)..(51): Xaa at this position is a single (one, 1) amino acid selected from the following options: His Tyr Ala
  MISC_FEATURE (73)..(73): Xaa at this position is a single (one, 1) amino acid selected from the following options: Glu Gln Ala
XRRRQRRKKRXXXMAVTALAARTWLGVWGVRTMQARGFIEKVXXSIENEXXKKLAALQEKARARFYREEEAQXKKGFAGGADRIAGASS

SEQ ID NO: 401 - protein, 72 aa, Artificial Sequence
  Designed; as detailed elsewhere in present application
  MISC_FEATURE (1)..(1): Xaa at this position is a single (one, 1) amino acid (or lack thereof) selected from the following options: Gly Pro or is absent (no amino acid at this position and so this position is not present)
  MISC_FEATURE (1)..(13): These amino acids are D-amino acids
  MISC_FEATURE (11)..(11): Xaa at this position is a single (one, 1) amino acid (or lack thereof) selected from the following options: Gly or is absent (no amino acid at this position and so this position is not present)
  MISC_FEATURE (12)..(12): Xaa at this position is a single (one, 1) amino acid (or lack thereof) selected from the following options: Tyr or is absent (no amino acid at this position and so this position is not present)
  MISC_FEATURE (13)..(13): Xaa at this position is a single (one, 1) amino acid (or lack thereof) selected from the following options: Gly Pro or is absent (no amino acid at this position and so this position is not present)
  MISC_FEATURE (39)..(72): These amino acids are D-amino acids
  MISC_FEATURE (60)..(60): Xaa at this position is a single (one, 1) amino acid selected from the following options: Glu Gln Ala
XRRRQRRKKRXXXMAVTALAARTWLGVWGVRTMQARGFKKLAALQEKARARFYREEEAQXKKGFAGGADRIA

SEQ ID NO: 402 - protein, 55 aa, Artificial Sequence
  Designed; as detailed elsewhere in present application
  MISC_FEATURE (1)..(1): Xaa at this position is a single (one, 1) amino acid (or lack thereof) selected from the following options: Gly Pro or is absent (no amino acid at this position and so this position is not present)
  MISC_FEATURE (1)..(13): These amino acids are D-amino acids
  MISC_FEATURE (11)..(11): Xaa at this position is a single (one, 1) amino acid (or lack thereof) selected from the following options: Gly or is absent (no amino acid at this position and so this position is not present)
  MISC_FEATURE (12)..(12): Xaa at this position is a single (one, 1) amino acid (or lack thereof) selected from the following options: Tyr or is absent (no amino acid at this position and so this position is not present)
  MISC_FEATURE (13)..(13): Xaa at this position is a single (one, 1) amino acid (or lack thereof) selected from the following options: Gly Pro or is absent (no amino acid at this position and so this position is not present)
  MISC_FEATURE (39)..(55): These amino acids are D-amino acids
XRRRQRRKKRXXXMAVTALAARTWLGVWGVRTMQARGFKVHHSIENEHHKKLAAL

SEQ ID NO: 403 - protein, 89 aa, Artificial Sequence
  Designed; as detailed elsewhere in present application
  MISC_FEATURE (1)..(1): Xaa at this position is a single (one, 1) amino acid (or lack thereof) selected from the following options: Gly Pro or is absent (no amino acid at this position and so this position is not present)
  MISC_FEATURE (1)..(13): These amino acids are D-amino acids
  MISC_FEATURE (11)..(11): Xaa at this position is a single (one, 1) amino acid (or lack thereof) selected from the following options: Gly or is absent (no amino acid at this position and so this position is not present)
  MISC_FEATURE (12)..(12): Xaa at this position is a single (one, 1) amino acid (or lack thereof) selected from the following options: Tyr or is absent (no amino acid at this position and so this position is not present)
  MISC_FEATURE (13)..(13): Xaa at this position is a single (one, 1) amino acid (or lack thereof) selected from the following options: Gly Pro or is absent (no amino acid at this position and so this position is not present)
  MISC_FEATURE (39)..(89): These amino acids are D-amino acids
  MISC_FEATURE (43)..(43): Xaa at this position is a single (one, 1) amino acid selected from the following options: His Ala
  MISC_FEATURE (44)..(44): Xaa at this position is a single (one, 1) amino acid selected from the following options: His Ala
  MISC_FEATURE (50)..(50): Xaa at this position is a single (one, 1) amino acid selected from the following options: His Lys Ala
  MISC_FEATURE (51)..(51): Xaa at this position is a single (one, 1) amino acid selected from the following options: His Tyr Ala
  MISC_FEATURE (73)..(73): Xaa at this position is a single (one, 1) amino acid selected from the following options: Glu Gln Ala
  MISC_FEATURE (85)..(85): Xaa at this position is a single (one, 1) amino acid selected from the following options: Thr Ala
XRRRQRRKKRXXXMAVTALAARTWLGVWGVRTMQARGFIEKVXXSIENEXXKKLAALQEKARARLYREGKAQXRKRFDVGANWVXAESS

SEQ ID NO: 404 - protein, 85 aa, Artificial Sequence
  Designed; as detailed elsewhere in present application
  MISC_FEATURE (1)..(1): Xaa at this position is a single (one, 1) amino acid (or lack thereof) selected from the following options: Gly Pro or is absent (no amino acid at this position and so this position is not present)
  MISC_FEATURE (1)..(13): These amino acids are D-amino acids
  MISC_FEATURE (11)..(11): Xaa at this position is a single (one, 1) amino acid (or lack thereof) selected from the following options: Gly or is absent (no amino acid at this position and so this position is not present)
  MISC_FEATURE (12)..(12): Xaa at this position is a single (one, 1) amino acid (or lack thereof) selected from the following options: Tyr or is absent (no amino acid at this position and so this position is not present)
  MISC_FEATURE (13)..(13): Xaa at this position is a single (one, 1) amino acid (or lack thereof) selected from the following options: Gly Pro or is absent (no amino acid at this position and so this position is not present)
  MISC_FEATURE (39)..(85): These amino acids are D-amino acids
  MISC_FEATURE (43)..(43): Xaa at this position is a single (one, 1) amino acid selected from the following options: His Ala
  MISC_FEATURE (44)..(44): Xaa at this position is a single (one, 1) amino acid selected from the following options: His Ala
  MISC_FEATURE (50)..(50): Xaa at this position is a single (one, 1) amino acid selected from the following options: His Lys Ala
  MISC_FEATURE (51)..(51): Xaa at this position is a single (one, 1) amino acid selected from the following options: His Tyr Ala
  MISC_FEATURE (73)..(73): Xaa at this position is a single (one, 1) amino acid selected from the following options: Glu Gln Ala
  MISC_FEATURE (85)..(85): Xaa at this position is a single (one, 1) amino acid selected from the following options: Thr Ala
XRRRQRRKKRXXXMAVTALAARTWLGVWGVRTMQARGFIEKVXXSIENEXXKKLAALQEKARARLYREGKAQXRKRFDVGANWVX

SEQ ID NO: 405 - protein, 72 aa, Artificial Sequence
  Designed; as detailed elsewhere in present application
  MISC_FEATURE (1)..(1): Xaa at this position is a single (one, 1) amino acid (or lack thereof) selected from the following options: Gly Pro or is absent (no amino acid at this position and so this position is not present)
  MISC_FEATURE (1)..(13): These amino acids are D-amino acids
  MISC_FEATURE (11)..(11): Xaa at this position is a single (one, 1) amino acid (or lack thereof) selected from the following options: Gly or is absent (no amino acid at this position and so this position is not present)
  MISC_FEATURE (12)..(12): Xaa at this position is a single (one, 1) amino acid (or lack thereof) selected from the following options: Tyr or is absent (no amino acid at this position and so this position is not present)
  MISC_FEATURE (13)..(13): Xaa at this position is a single (one, 1) amino acid (or lack thereof) selected from the following options: Gly Pro or is absent (no amino acid at this position and so this position is not present)
  MISC_FEATURE (39)..(72): These amino acids are D-amino acids
  MISC_FEATURE (60)..(60): Xaa at this position is a single (one, 1) amino acid selected from the following options: Glu Gln Ala
  MISC_FEATURE (72)..(72): Xaa at this position is a single (one, 1) amino acid selected from the following options: Thr Ala
XRRRQRRKKRXXXMAVTALAARTWLGVWGVRTMQARGFKKLAALQEKARARLYREGKAQXRKRFDVGANWVX

SEQ ID NO: 406 - protein, 55 aa, Artificial Sequence; identical to SEQ ID NO: 402
  Designed; as detailed elsewhere in present application
  MISC_FEATURE (1)..(1): Xaa at this position is a single (one, 1) amino acid (or lack thereof) selected from the following options: Gly Pro or is absent (no amino acid at this position and so this position is not present)
  MISC_FEATURE (1)..(13): These amino acids are D-amino acids
  MISC_FEATURE (11)..(11): Xaa at this position is a single (one, 1) amino acid (or lack thereof) selected from the following options: Gly or is absent (no amino acid at this position and so this position is not present)
  MISC_FEATURE (12)..(12): Xaa at this position is a single (one, 1) amino acid (or lack thereof) selected from the following options: Tyr or is absent (no amino acid at this position and so this position is not present)
  MISC_FEATURE (13)..(13): Xaa at this position is a single (one, 1) amino acid (or lack thereof) selected from the following options: Gly Pro or is absent (no amino acid at this position and so this position is not present)
  MISC_FEATURE (39)..(55): These amino acids are D-amino acids

SEQ ID NO: 407 - protein, 85 aa, Artificial Sequence
  Designed; as detailed elsewhere in present application
  MISC_FEATURE (1)..(1): Xaa at this position is a single (one, 1) amino acid (or lack thereof) selected from the following options: Gly Pro or is absent (no amino acid at this position and so this position is not present)
  MISC_FEATURE (1)..(9): These amino acids are D-amino acids
  MISC_FEATURE (9)..(9): Xaa at this position is a single (one, 1) amino acid (or lack thereof) selected from the following options: Gly Pro or is absent (no amino acid at this position and so this position is not present)
  MISC_FEATURE (35)..(85): These amino acids are D-amino acids
  MISC_FEATURE (39)..(39): Xaa at this position is a single (one, 1) amino acid selected from the following options: His Ala
  MISC_FEATURE (40)..(40): Xaa at this position is a single (one, 1) amino acid selected from the following options: His Ala
  MISC_FEATURE (46)..(46): Xaa at this position is a single (one, 1) amino acid selected from the following options: His Lys Ala
  MISC_FEATURE (47)..(47): Xaa at this position is a single (one, 1) amino acid selected from the following options: His Tyr Ala
  MISC_FEATURE (69)..(69): Xaa at this position is a single (one, 1) amino acid selected from the following options: Glu Gln Ala
XRRRRRRRXMAVTALAARTWLGVWGVRTMQARGFIEKAXXSIENEXXKKLAALQEKARARFYREEEAQXRKGFAGGADRVAGASS

SEQ ID NO: 408 - protein, 68 aa, Artificial Sequence
  Designed; as detailed elsewhere in present application
  MISC_FEATURE (1)..(1): Xaa at this position is a single (one, 1) amino acid (or lack thereof) selected from the following options: Gly Pro or is absent (no amino acid at this position and so this position is not present)
  MISC_FEATURE (1)..(9): These amino acids are D-amino acids
  MISC_FEATURE (9)..(9): Xaa at this position is a single (one, 1) amino acid (or lack thereof) selected from the following options: Gly Pro or is absent (no amino acid at this position and so this position is not present)
  MISC_FEATURE (35)..(68): These amino acids are D-amino acids
  MISC_FEATURE (56)..(56): Xaa at this position is a single (one, 1) amino acid selected from the following options: Glu Gln Ala
XRRRRRRRXMAVTALAARTWLGVWGVRTMQARGFKKLAALQEKARARFYREEEAQXRKGFAGGADRVA

SEQ ID NO: 409 - protein, 51 aa, Artificial Sequence
  Designed; as detailed elsewhere in present application
  MISC_FEATURE (1)..(1): Xaa at this position is a single (one, 1) amino acid (or lack thereof) selected from the following options: Gly Pro or is absent (no amino acid at this position and so this position is not present)
  MISC_FEATURE (1)..(9): These amino acids are D-amino acids
  MISC_FEATURE (9)..(9): Xaa at this position is a single (one, 1) amino acid (or lack thereof) selected from the following options: Gly Pro or is absent (no amino acid at this position and so this position is not present)
  MISC_FEATURE (35)..(51): These amino acids are D-amino acids
XRRRRRRRXMAVTALAARTWLGVWGVRTMQARGFKAHHSIENEHHKKLAAL

SEQ ID NO: 410 - protein, 85 aa, Artificial Sequence
  Designed; as detailed elsewhere in present application
  MISC_FEATURE (1)..(1): Xaa at this position is a single (one, 1) amino acid (or lack thereof) selected from the following options: Gly Pro or is absent (no amino acid at this position and so this position is not present)
  MISC_FEATURE (1)..(9): These amino acids are D-amino acids
  MISC_FEATURE (9)..(9): Xaa at this position is a single (one, 1) amino acid (or lack thereof) selected from the following options: Gly Pro or is absent (no amino acid at this position and so this position is not present)
  MISC_FEATURE (35)..(85): These amino acids are D-amino acids
  MISC_FEATURE (39)..(39): Xaa at this position is a single (one, 1) amino acid selected from the following options: His Ala
  MISC_FEATURE (40)..(40): Xaa at this position is a single (one, 1) amino acid selected from the following options: His Ala
  MISC_FEATURE (46)..(46): Xaa at this position is a single (one, 1) amino acid selected from the following options: His Lys Ala
  MISC_FEATURE (47)..(47): Xaa at this position is a single (one, 1) amino acid selected from the following options: His Tyr Ala
  MISC_FEATURE (69)..(69): Xaa at this position is a single (one, 1) amino acid selected from the following options: Glu Gln Ala
  MISC_FEATURE (81)..(81): Xaa at this position is a single (one, 1) amino acid selected from the following options: Ser Ala
XRRRRRRRXMAVTALAARTWLGVWGVRTMQARGFIEKKXXVIEEEXXKKLAALQERSQARFYREEEAQXRKGFAGGAERIXGAGR

SEQ ID NO: 411 - protein, 68 aa, Artificial Sequence
  Designed; as detailed elsewhere in present application
  MISC_FEATURE (1)..(1): Xaa at this position is a single (one, 1) amino acid (or lack thereof) selected from the following options: Gly Pro or is absent (no amino acid at this position and so this position is not present)
  MISC_FEATURE (1)..(9): These amino acids are D-amino acids
  MISC_FEATURE (9)..(9): Xaa at this position is a single (one, 1) amino acid (or lack thereof) selected from the following options: Gly Pro or is absent (no amino acid at this position and so this position is not present)
  MISC_FEATURE (35)..(68): These amino acids are D-amino acids
  MISC_FEATURE (56)..(56): Xaa at this position is a single (one, 1) amino acid selected from the following options: Glu Gln Ala
  MISC_FEATURE (68)..(68): Xaa at this position is a single (one, 1) amino acid selected from the following options: Ser Ala
XRRRRRRRXMAVTALAARTWLGVWGVRTMQARGFKKLAALQERSQARFYREEEAQXRKGFAGGAERIX

SEQ ID NO: 412 - protein, 51 aa, Artificial Sequence
  Designed; as detailed elsewhere in present application
  MISC_FEATURE (1)..(1): Xaa at this position is a single (one, 1) amino acid (or lack thereof) selected from the following options: Gly Pro or is absent (no amino acid at this position and so this position is not present)
  MISC_FEATURE (1)..(9): These amino acids are D-amino acids
  MISC_FEATURE (9)..(9): Xaa at this position is a single (one, 1) amino acid (or lack thereof) selected from the following options: Gly Pro or is absent (no amino acid at this position and so this position is not present)
  MISC_FEATURE (35)..(51): These amino acids are D-amino acids
XRRRRRRRXMAVTALAARTWLGVWGVRTMQARGFKKHHVIEEEHHKKLAAL

SEQ ID NO: 413 - protein, 85 aa, Artificial Sequence
  Designed; as detailed elsewhere in present application
  MISC_FEATURE (1)..(1): Xaa at this position is a single (one, 1) amino acid (or lack thereof) selected from the following options: Gly Pro or is absent (no amino acid at this position and so this position is not present)
  MISC_FEATURE (1)..(9): These amino acids are D-amino acids
  MISC_FEATURE (9)..(9): Xaa at this position is a single (one, 1) amino acid (or lack thereof) selected from the following options: Gly Pro or is absent (no amino acid at this position and so this position is not present)
  MISC_FEATURE (35)..(85): These amino acids are D-amino acids
  MISC_FEATURE (39)..(39): Xaa at this position is a single (one, 1) amino acid selected from the following options: His Ala
  MISC_FEATURE (40)..(40): Xaa at this position is a single (one, 1) amino acid selected from the following options: His Ala
  MISC_FEATURE (46)..(46): Xaa at this position is a single (one, 1) amino acid selected from the following options: His Lys Ala
  MISC_FEATURE (47)..(47): Xaa at this position is a single (one, 1) amino acid selected from the following options: His Tyr Ala
  MISC_FEATURE (69)..(69): Xaa at this position is a single (one, 1) amino acid selected from the following options: Glu Gln Ala
XRRRRRRRXMAVTALAARTWLGVWGVRTMQARGFIEKVXXSIENEXXKKLAALQEKARARFYREEEAQXKKGFAGGADRIAGASS

SEQ ID NO: 414 - protein, 68 aa, Artificial Sequence
  Designed; as detailed elsewhere in present application
  MISC_FEATURE (1)..(1): Xaa at this position is a single (one, 1) amino acid (or lack thereof) selected from the following options: Gly Pro or is absent (no amino acid at this position and so this position is not present)
  MISC_FEATURE (1)..(9): These amino acids are D-amino acids
  MISC_FEATURE (9)..(9): Xaa at this position is a single (one, 1) amino acid (or lack thereof) selected from the following options: Gly Pro or is absent (no amino acid at this position and so this position is not present)
  MISC_FEATURE (35)..(68): These amino acids are D-amino acids
  MISC_FEATURE (56)..(56): Xaa at this position is a single (one, 1) amino acid selected from the following options: Glu Gln Ala
XRRRRRRRXMAVTALAARTWLGVWGVRTMQARGFKKLAALQEKARARFYREEEAQXKKGFAGGADRIA

SEQ ID NO: 415 - protein, 51 aa, Artificial Sequence
  Designed; as detailed elsewhere in present application
  MISC_FEATURE (1)..(1): Xaa at this position is a single (one, 1) amino acid (or lack thereof) selected from the following options: Gly Pro or is absent (no amino acid at this position and so this position is not present)
  MISC_FEATURE (1)..(9): These amino acids are D-amino acids
  MISC_FEATURE (9)..(9): Xaa at this position is a single (one, 1) amino acid (or lack thereof) selected from the following options: Gly Pro or is absent (no amino acid at this position and so this position is not present)
  MISC_FEATURE (35)..(51): These amino acids are D-amino acids
XRRRRRRRXMAVTALAARTWLGVWGVRTMQARGFKVHHSIENEHHKKLAAL

SEQ ID NO: 416 - protein, 85 aa, Artificial Sequence
  Designed; as detailed elsewhere in present application
  MISC_FEATURE (1)..(1): Xaa at this position is a single (one, 1) amino acid (or lack thereof) selected from the following options: Gly Pro or is absent (no amino acid at this position and so this position is not present)
  MISC_FEATURE (1)..(9): These amino acids are D-amino acids
  MISC_FEATURE (9)..(9): Xaa at this position is a single (one, 1) amino acid (or lack thereof) selected from the following options: Gly Pro or is absent (no amino acid at this position and so this position is not present)
  MISC_FEATURE (35)..(85): These amino acids are D-amino acids
  MISC_FEATURE (39)..(39): Xaa at this position is a single (one, 1) amino acid selected from the following options: His Ala
  MISC_FEATURE (40)..(40): Xaa at this position is a single (one, 1) amino acid selected from the following options: His Ala
  MISC_FEATURE (46)..(46): Xaa at this position is a single (one, 1) amino acid selected from the following options: His Lys Ala
  MISC_FEATURE (47)..(47): Xaa at this position is a single (one, 1) amino acid selected from the following options: His Tyr Ala
  MISC_FEATURE (69)..(69): Xaa at this position is a single (one, 1) amino acid selected from the following options: Glu Gln Ala
  MISC_FEATURE (81)..(81): Xaa at this position is a single (one, 1) amino acid selected from the following options: Thr Ala
XRRRRRRRXMAVTALAARTWLGVWGVRTMQARGFIEKVXXSIENEXXKKLAALQEKARARLYREGKAQXRKRFDVGANWVXAESS

SEQ ID NO: 417 - protein, 81 aa, Artificial Sequence
  Designed; as detailed elsewhere in present application
  MISC_FEATURE (1)..(1): Xaa at this position is a single (one, 1) amino acid (or lack thereof) selected from the following options: Gly Pro or is absent (no amino acid at this position and so this position is not present)
  MISC_FEATURE (1)..(9): These amino acids are D-amino acids
  MISC_FEATURE (9)..(9): Xaa at this position is a single (one, 1) amino acid (or lack thereof) selected from the following options: Gly Pro or is absent (no amino acid at this position and so this position is not present)
  MISC_FEATURE (35)..(81): These amino acids are D-amino acids
  MISC_FEATURE (39)..(39): Xaa at this position is a single (one, 1) amino acid selected from the following options: His Ala
  MISC_FEATURE (40)..(40): Xaa at this position is a single (one, 1) amino acid selected from the following options: His Ala
  MISC_FEATURE (46)..(46): Xaa at this position is a single (one, 1) amino acid selected from the following options: His Lys Ala
  MISC_FEATURE (47)..(47): Xaa at this position is a single (one, 1) amino acid selected from the following options: His Tyr Ala
  MISC_FEATURE (69)..(69): Xaa at this position is a single (one, 1) amino acid selected from the following options: Glu Gln Ala
  MISC_FEATURE (81)..(81): Xaa at this position is a single (one, 1) amino acid selected from the following options: Thr Ala
XRRRRRRRXMAVTALAARTWLGVWGVRTMQARGFIEKVXXSIENEXXKKLAALQEKARARLYREGKAQXRKRFDVGANWVX

SEQ ID NO: 418 - protein, 68 aa, Artificial Sequence
  Designed; as detailed elsewhere in present application
  MISC_FEATURE (1)..(1): Xaa at this position is a single (one, 1) amino acid (or lack thereof) selected from the following options: Gly Pro or is absent (no amino acid at this position and so this position is not present)
  MISC_FEATURE (1)..(9): These amino acids are D-amino acids
  MISC_FEATURE (9)..(9): Xaa at this position is a single (one, 1) amino acid (or lack thereof) selected from the following options: Gly Pro or is absent (no amino acid at this position and so this position is not present)
  MISC_FEATURE (35)..(68): These amino acids are D-amino acids
  MISC_FEATURE (56)..(56): Xaa at this position is a single (one, 1) amino acid selected from the following options: Glu Gln Ala
  MISC_FEATURE (68)..(68): Xaa at this position is a single (one, 1) amino acid selected from the following options: Thr Ala
XRRRRRRRXMAVTALAARTWLGVWGVRTMQARGFKKLAALQEKARARLYREGKAQXRKRFDVGANWVX

SEQ ID NO: 419 - protein, 51 aa, Artificial Sequence; identical to SEQ ID NO: 415
  Designed; as detailed elsewhere in present application
  MISC_FEATURE (1)..(1): Xaa at this position is a single (one, 1) amino acid (or lack thereof) selected from the following options: Gly Pro or is absent (no amino acid at this position and so this position is not present)
  MISC_FEATURE (1)..(9): These amino acids are D-amino acids
  MISC_FEATURE (9)..(9): Xaa at this position is a single (one, 1) amino acid (or lack thereof) selected from the following options: Gly Pro or is absent (no amino acid at this position and so this position is not present)
  MISC_FEATURE (35)..(51): These amino acids are D-amino acids

SEQ ID NO: 420 - protein, 85 aa, Artificial Sequence
  Designed; as detailed elsewhere in present application
  MISC_FEATURE (1)..(1): Xaa at this position is a single (one, 1) amino acid (or lack thereof) selected from the following options: Gly Pro or is absent (no amino acid at this position and so this position is not present)
  MISC_FEATURE (1)..(9): These amino acids are D-amino acids
  MISC_FEATURE (9)..(9): Xaa at this position is a single (one, 1) amino acid (or lack thereof) selected from the following options: Gly Pro or is absent (no amino acid at this position and so this position is not present)
  MISC_FEATURE (35)..(85): These amino acids are D-amino acids
  MISC_FEATURE (39)..(39): Xaa at this position is a single (one, 1) amino acid selected from the following options: His Ala
  MISC_FEATURE (40)..(40): Xaa at this position is a single (one, 1) amino acid selected from the following options: His Ala
  MISC_FEATURE (46)..(46): Xaa at this position is a single (one, 1) amino acid selected from the following options: His Lys Ala
  MISC_FEATURE (47)..(47): Xaa at this position is a single (one, 1) amino acid selected from the following options: His Tyr Ala
  MISC_FEATURE (69)..(69): Xaa at this position is a single (one, 1) amino acid selected from the following options: Glu Gln Ala
  MISC_FEATURE (81)..(81): Xaa at this position is a single (one, 1) amino acid selected from the following options: Ser Ala
XRRRRRRRXMAVTALAARTWLGVWGVRTMQARGFIAKKXXYIEDEXXKKLAELQEKTKQRFFREEEAQXRKGFAGGADRIXGSSS

SEQ ID NO: 421 - protein, 68 aa, Artificial Sequence
  Designed; as detailed elsewhere in present application
  MISC_FEATURE (1)..(1): Xaa at this position is a single (one, 1) amino acid (or lack thereof) selected from the following options: Gly Pro or is absent (no amino acid at this position and so this position is not present)
  MISC_FEATURE (1)..(9): These amino acids are D-amino acids
  MISC_FEATURE (9)..(9): Xaa at this position is a single (one, 1) amino acid (or lack thereof) selected from the following options: Gly Pro or is absent (no amino acid at this position and so this position is not present)
  MISC_FEATURE (35)..(68): These amino acids are D-amino acids
  MISC_FEATURE (56)..(56): Xaa at this position is a single (one, 1) amino acid selected from the following options: Glu Gln Ala
  MISC_FEATURE (68)..(68): Xaa at this position is a single (one, 1) amino acid selected from the following options: Ser Ala
XRRRRRRRXMAVTALAARTWLGVWGVRTMQARGFKKLAELQEKTKQRFFREEEAQXRKGFAGGADRIX

SEQ ID NO: 422 - protein, 51 aa, Artificial Sequence
  Designed; as detailed elsewhere in present application
  MISC_FEATURE (1)..(1): Xaa at this position is a single (one, 1) amino acid (or lack thereof) selected from the following options: Gly Pro or is absent (no amino acid at this position and so this position is not present)
  MISC_FEATURE (1)..(9): These amino acids are D-amino acids
  MISC_FEATURE (9)..(9): Xaa at this position is a single (one, 1) amino acid (or lack thereof) selected from the following options: Gly Pro or is absent (no amino acid at this position and so this position is not present)
  MISC_FEATURE (35)..(51): These amino acids are D-amino acids
XRRRRRRRXMAVTALAARTWLGVWGVRTMQARGFKKHHYIEDEHHKKLAEL

SEQ ID NO: 423 - protein, 85 aa, Artificial Sequence
  Designed; as detailed elsewhere in present application
  MISC_FEATURE (1)..(1): Xaa at this position is a single (one, 1) amino acid (or lack thereof) selected from the following options: Gly Pro or is absent (no amino acid at this position and so this position is not present)
  MISC_FEATURE (1)..(9): These amino acids are D-amino acids
  MISC_FEATURE (9)..(9): Xaa at this position is a single (one, 1) amino acid (or lack thereof) selected from the following options: Gly Pro or is absent (no amino acid at this position and so this position is not present)
  MISC_FEATURE (35)..(85): These amino acids are D-amino acids
  MISC_FEATURE (39)..(39): Xaa at this position is a single (one, 1) amino acid selected from the following options: His Ala
  MISC_FEATURE (40)..(40): Xaa at this position is a single (one, 1) amino acid selected from the following options: His Ala
  MISC_FEATURE (46)..(46): Xaa at this position is a single (one, 1) amino acid selected from the following options: His Lys Ala
  MISC_FEATURE (47)..(47): Xaa at this position is a single (one, 1) amino acid selected from the following options: His Tyr Ala
  MISC_FEATURE (69)..(69): Xaa at this position is a single (one, 1) amino acid selected from the following options: Glu Gln Ala
XRRRRRRRXMAGSALAVRARFGVWGMKVLQTRGFIEKAXXSIENEXXKKLAALQEKARARFYREEEAQXRKGFAGGADRVAGASS

SEQ ID NO: 424 - protein, 68 aa, Artificial Sequence
  Designed; as detailed elsewhere in present application
  MISC_FEATURE (1)..(1): Xaa at this position is a single (one, 1) amino acid (or lack thereof) selected from the following options: Gly Pro or is absent (no amino acid at this position and so this position is not present)
  MISC_FEATURE (1)..(9): These amino acids are D-amino acids
  MISC_FEATURE (9)..(9): Xaa at this position is a single (one, 1) amino acid (or lack thereof) selected from the following options: Gly Pro or is absent (no amino acid at this position and so this position is not present)
  MISC_FEATURE (35)..(68): These amino acids are D-amino acids
  MISC_FEATURE (56)..(56): Xaa at this position is a single (one, 1) amino acid selected from the following options: Glu Gln Ala
XRRRRRRRXMAGSALAVRARFGVWGMKVLQTRGFKKLAALQEKARARFYREEEAQXRKGFAGGADRVA

SEQ ID NO: 425 - protein, 51 aa, Artificial Sequence
  Designed; as detailed elsewhere in present application
  MISC_FEATURE (1)..(1): Xaa at this position is a single (one, 1) amino acid (or lack thereof) selected from the following options: Gly Pro or is absent (no amino acid at this position and so this position is not present)
  MISC_FEATURE (1)..(9): These amino acids are D-amino acids
  MISC_FEATURE (9)..(9): Xaa at this position is a single (one, 1) amino acid (or lack thereof) selected from the following options: Gly Pro or is absent (no amino acid at this position and so this position is not present)
  MISC_FEATURE (35)..(51): These amino acids are D-amino acids
XRRRRRRRXMAGSALAVRARFGVWGMKVLQTRGFKAHHSIENEHHKKLAAL

SEQ ID NO: 426 - protein, 85 aa, Artificial Sequence
  Designed; as detailed elsewhere in present application
  MISC_FEATURE (1)..(1): Xaa at this position is a single (one, 1) amino acid (or lack thereof) selected from the following options: Gly Pro or is absent (no amino acid at this position and so this position is not present)
  MISC_FEATURE (1)..(9): These amino acids are D-amino acids
  MISC_FEATURE (9)..(9): Xaa at this position is a single (one, 1) amino acid (or lack thereof) selected from the following options: Gly Pro or is absent (no amino acid at this position and so this position is not present)
  MISC_FEATURE (35)..(85): These amino acids are D-amino acids
  MISC_FEATURE (39)..(39): Xaa at this position is a single (one, 1) amino acid selected from the following options: His Ala
  MISC_FEATURE (40)..(40): Xaa at this position is a single (one, 1) amino acid selected from the following options: His Ala
  MISC_FEATURE (46)..(46): Xaa at this position is a single (one, 1) amino acid selected from the following options: His Lys Ala
  MISC_FEATURE (47)..(47): Xaa at this position is a single (one, 1) amino acid selected from the following options: His Tyr Ala
  MISC_FEATURE (69)..(69): Xaa at this position is a single (one, 1) amino acid selected from the following options: Glu Gln Ala
  MISC_FEATURE (81)..(81): Xaa at this position is a single (one, 1) amino acid selected from the following options: Ser Ala
XRRRRRRRXMAGSALAVRARFGVWGMKVLQTRGFIEKKXXVIEEEXXKKLAALQERSQARFYREEEAQXRKGFAGGAERIXGAGR

SEQ ID NO: 427 - protein, 68 aa, Artificial Sequence
  Designed; as detailed elsewhere in present application
  MISC_FEATURE (1)..(1): Xaa at this position is a single (one, 1) amino acid (or lack thereof) selected from the following options: Gly Pro or is absent (no amino acid at this position and so this position is not present)
  MISC_FEATURE (1)..(9): These amino acids are D-amino acids
  MISC_FEATURE (9)..(9): Xaa at this position is a single (one, 1) amino acid (or lack thereof) selected from the following options: Gly Pro or is absent (no amino acid at this position and so this position is not present)
  MISC_FEATURE (35)..(68): These amino acids are D-amino acids
  MISC_FEATURE (56)..(56): Xaa at this position is a single (one, 1) amino acid selected from the following options: Glu Gln Ala
  MISC_FEATURE (68)..(68): Xaa at this position is a single (one, 1) amino acid selected from the following options: Ser Ala
XRRRRRRRXMAGSALAVRARFGVWGMKVLQTRGFKKLAALQERSQARFYREEEAQXRKGFAGGAERIX

SEQ ID NO: 428 - protein, 51 aa, Artificial Sequence
  Designed; as detailed elsewhere in present application
  MISC_FEATURE (1)..(1): Xaa at this position is a single (one, 1) amino acid (or lack thereof) selected from the following options: Gly Pro or is absent (no amino acid at this position and so this position is not present)
  MISC_FEATURE (1)..(9): These amino acids are D-amino acids
  MISC_FEATURE (9)..(9): Xaa at this position is a single (one, 1) amino acid (or lack thereof) selected from the following options: Gly Pro or is absent (no amino acid at this position and so this position is not present)
  MISC_FEATURE (35)..(51): These amino acids are D-amino acids
XRRRRRRRXMAGSALAVRARFGVWGMKVLQTRGFKKHHVIEEEHHKKLAAL

SEQ ID NO: 429 - protein, 85 aa, Artificial Sequence
  Designed; as detailed elsewhere in present application
  MISC_FEATURE (1)..(1): Xaa at this position is a single (one, 1) amino acid (or lack thereof) selected from the following options: Gly Pro or is absent (no amino acid at this position and so this position is not present)
  MISC_FEATURE (1)..(9): These amino acids are D-amino acids
  MISC_FEATURE (9)..(9): Xaa at this position is a single (one, 1) amino acid (or lack thereof) selected from the following options: Gly Pro or is absent (no amino acid at this position and so this position is not present)
  MISC_FEATURE (35)..(85): These amino acids are D-amino acids
  MISC_FEATURE (39)..(39): Xaa at this position is a single (one, 1) amino acid selected from the following options: His Ala
  MISC_FEATURE (40)..(40): Xaa at this position is a single (one, 1) amino acid selected from the following options: His Ala
  MISC_FEATURE (46)..(46): Xaa at this position is a single (one, 1) amino acid selected from the following options: His Lys Ala
  MISC_FEATURE (47)..(47): Xaa at this position is a single (one, 1) amino acid selected from the following options: His Tyr Ala
  MISC_FEATURE (69)..(69): Xaa at this position is a single (one, 1) amino acid selected from the following options: Glu Gln Ala
XRRRRRRRXMAGSALAVRARFGVWGMKVLQTRGFIEKVXXSIENEXXKKLAALQEKARARFYREEEAQXKKGFAGGADRIAGASS

SEQ ID NO: 430 - protein, 68 aa, Artificial Sequence
  Designed; as detailed elsewhere in present application
  MISC_FEATURE (1)..(1): Xaa at this position is a single (one, 1) amino acid (or lack thereof) selected from the following options: Gly Pro or is absent (no amino acid at this position and so this position is not present)
  MISC_FEATURE (1)..(9): These amino acids are D-amino acids
  MISC_FEATURE (9)..(9): Xaa at this position is a single (one, 1) amino acid (or lack thereof) selected from the following options: Gly Pro or is absent (no amino acid at this position and so this position is not present)
  MISC_FEATURE (35)..(68): These amino acids are D-amino acids
  MISC_FEATURE (56)..(56): Xaa at this position is a single (one, 1) amino acid selected from the following options: Glu Gln Ala
XRRRRRRRXMAGSALAVRARFGVWGMKVLQTRGFKKLAALQEKARARFYREEEAQXKKGFAGGADRIA

SEQ ID NO: 431 - protein, 51 aa, Artificial Sequence
  Designed; as detailed elsewhere in present application
  MISC_FEATURE (1)..(1): Xaa at this position is a single (one, 1) amino acid (or lack thereof) selected from the following options: Gly Pro or is absent (no amino acid at this position and so this position is not present)
  MISC_FEATURE (1)..(9): These amino acids are D-amino acids
  MISC_FEATURE (9)..(9): Xaa at this position is a single (one, 1) amino acid (or lack thereof) selected from the following options: Gly Pro or is absent (no amino acid at this position and so this position is not present)
  MISC_FEATURE (35)..(51): These amino acids are D-amino acids
XRRRRRRRXMAGSALAVRARFGVWGMKVLQTRGFKVHHSIENEHHKKLAAL

SEQ ID NO: 432 - protein, 85 aa, Artificial Sequence
  Designed; as detailed elsewhere in present application
  MISC_FEATURE (1)..(1): Xaa at this position is a single (one, 1) amino acid (or lack thereof) selected from the following options: Gly Pro or is absent (no amino acid at this position and so this position is not present)
  MISC_FEATURE (1)..(9): These amino acids are D-amino acids
  MISC_FEATURE (9)..(9): Xaa at this position is a single (one, 1) amino acid (or lack thereof) selected from the following options: Gly Pro or is absent (no amino acid at this position and so this position is not present)
  MISC_FEATURE (35)..(85): These amino acids are D-amino acids
  MISC_FEATURE (39)..(39): Xaa at this position is a single (one, 1) amino acid selected from the following options: His Ala
  MISC_FEATURE (40)..(40): Xaa at this position is a single (one, 1) amino acid selected from the following options: His Ala
  MISC_FEATURE (46)..(46): Xaa at this position is a single (one, 1) amino acid selected from the following options: His Lys Ala
  MISC_FEATURE (47)..(47): Xaa at this position is a single (one, 1) amino acid selected from the following options: His Tyr Ala
  MISC_FEATURE (69)..(69): Xaa at this position is a single (one, 1) amino acid selected from the following options: Glu Gln Ala
  MISC_FEATURE (81)..(81): Xaa at this position is a single (one, 1) amino acid selected from the following options: Thr Ala
XRRRRRRRXMAGSALAVRARFGVWGMKVLQTRGFIEKVXXSIENEXXKKLAALQEKARARLYREGKAQXRKRFDVGANWVXAESS

SEQ ID NO: 433 - protein, 81 aa, Artificial Sequence
  Designed; as detailed elsewhere in present application
  MISC_FEATURE (1)..(1): Xaa at this position is a single (one, 1) amino acid (or lack thereof) selected from the following options: Gly Pro or is absent (no amino acid at this position and so this position is not present)
  MISC_FEATURE (1)..(9): These amino acids are D-amino acids
  MISC_FEATURE (9)..(9): Xaa at this position is a single (one, 1) amino acid (or lack thereof) selected from the following options: Gly Pro or is absent (no amino acid at this position and so this position is not present)
  MISC_FEATURE (35)..(81): These amino acids are D-amino acids
  MISC_FEATURE (39)..(39): Xaa at this position is a single (one, 1) amino acid selected from the following options: His Ala
  MISC_FEATURE (40)..(40): Xaa at this position is a single (one, 1) amino acid selected from the following options: His Ala
  MISC_FEATURE (46)..(46): Xaa at this position is a single (one, 1) amino acid selected from the following options: His Lys Ala
  MISC_FEATURE (47)..(47): Xaa at this position is a single (one, 1) amino acid selected from the following options: His Tyr Ala
  MISC_FEATURE (69)..(69): Xaa at this position is a single (one, 1) amino acid selected from the following options: Glu Gln Ala
  MISC_FEATURE (81)..(81): Xaa at this position is a single (one, 1) amino acid selected from the following options: Thr Ala
XRRRRRRRXMAGSALAVRARFGVWGMKVLQTRGFIEKVXXSIENEXXKKLAALQEKARARLYREGKAQXRKRFDVGANWVX

SEQ ID NO: 434 - protein, 68 aa, Artificial Sequence
  Designed; as detailed elsewhere in present application
  MISC_FEATURE (1)..(1): Xaa at this position is a single (one, 1) amino acid (or lack thereof) selected from the following options: Gly Pro or is absent (no amino acid at this position and so this position is not present)
  MISC_FEATURE (1)..(9): These amino acids are D-amino acids
  MISC_FEATURE (9)..(9): Xaa at this position is a single (one, 1) amino acid (or lack thereof) selected from the following options: Gly Pro or is absent (no amino acid at this position and so this position is not present)
  MISC_FEATURE (35)..(68): These amino acids are D-amino acids
  MISC_FEATURE (56)..(56): Xaa at this position is a single (one, 1) amino acid selected from the following options: Glu Gln Ala
  MISC_FEATURE (68)..(68): Xaa at this position is a single (one, 1) amino acid selected from the following options: Thr Ala
XRRRRRRRXMAGSALAVRARFGVWGMKVLQTRGFKKLAALQEKARARLYREGKAQXRKRFDVGANWVX

SEQ ID NO: 435 - protein, 51 aa, Artificial Sequence; identical to SEQ ID NO: 431
  Designed; as detailed elsewhere in present application
  MISC_FEATURE (1)..(1): Xaa at this position is a single (one, 1) amino acid (or lack thereof) selected from the following options: Gly Pro or is absent (no amino acid at this position and so this position is not present)
  MISC_FEATURE (1)..(9): These amino acids are D-amino acids
  MISC_FEATURE (9)..(9): Xaa at this position is a single (one, 1) amino acid (or lack thereof) selected from the following options: Gly Pro or is absent (no amino acid at this position and so this position is not present)
  MISC_FEATURE (35)..(51): These amino acids are D-amino acids

SEQ ID NO: 436 - protein, 85 aa, Artificial Sequence
  Designed; as detailed elsewhere in present application
  MISC_FEATURE (1)..(1): Xaa at this position is a single (one, 1) amino acid (or lack thereof) selected from the following options: Gly Pro or is absent (no amino acid at this position and so this position is not present)
  MISC_FEATURE (1)..(9): These amino acids are D-amino acids
  MISC_FEATURE (9)..(9): Xaa at this position is a single (one, 1) amino acid (or lack thereof) selected from the following options: Gly Pro or is absent (no amino acid at this position and so this position is not present)
  MISC_FEATURE (35)..(85): These amino acids are D-amino acids
  MISC_FEATURE (39)..(39): Xaa at this position is a single (one, 1) amino acid selected from the following options: His Ala
  MISC_FEATURE (40)..(40): Xaa at this position is a single (one, 1) amino acid selected from the following options: His Ala
  MISC_FEATURE (46)..(46): Xaa at this position is a single (one, 1) amino acid selected from the following options: His Lys Ala
  MISC_FEATURE (47)..(47): Xaa at this position is a single (one, 1) amino acid selected from the following options: His Tyr Ala
  MISC_FEATURE (69)..(69): Xaa at this position is a single (one, 1) amino acid selected from the following options: Glu Gln Ala
  MISC_FEATURE (81)..(81): Xaa at this position is a single (one, 1) amino acid selected from the following options: Ser Ala
XRRRRRRRXMAGSALAVRARFGVWGMKVLQTRGFIAKKXXYIEDEXXKKLAELQEKTKQRFFREEEAQXRKGFAGGADRIXGSSS

SEQ ID NO: 437 - protein, 68 aa, Artificial Sequence
  Designed; as detailed elsewhere in present application
  MISC_FEATURE (1)..(1): Xaa at this position is a single (one, 1) amino acid (or lack thereof) selected from the following options: Gly Pro or is absent (no amino acid at this position and so this position is not present)
  MISC_FEATURE (1)..(9): These amino acids are D-amino acids
  MISC_FEATURE (9)..(9): Xaa at this position is a single (one, 1) amino acid (or lack thereof) selected from the following options: Gly Pro or is absent (no amino acid at this position and so this position is not present)
  MISC_FEATURE (35)..(68): These amino acids are D-amino acids
  MISC_FEATURE (56)..(56): Xaa at this position is a single (one, 1) amino acid selected from the following options: Glu Gln Ala
  MISC_FEATURE (68)..(68): Xaa at this position is a single (one, 1) amino acid selected from the following options: Ser Ala
XRRRRRRRXMAGSALAVRARFGVWGMKVLQTRGFKKLAELQEKTKQRFFREEEAQXRKGFAGGADRIX

SEQ ID NO: 438 - protein, 51 aa, Artificial Sequence
  Designed; as detailed elsewhere in present application
  MISC_FEATURE (1)..(1): Xaa at this position is a single (one, 1) amino acid (or lack thereof) selected from the following options: Gly Pro or is absent (no amino acid at this position and so this position is not present)
  MISC_FEATURE (1)..(9): These amino acids are D-amino acids
  MISC_FEATURE (9)..(9): Xaa at this position is a single (one, 1) amino acid (or lack thereof) selected from the following options: Gly Pro or is absent (no amino acid at this position and so this position is not present)
  MISC_FEATURE (35)..(51): These amino acids are D-amino acids
XRRRRRRRXMAGSALAVRARFGVWGMKVLQTRGFKKHHYIEDEHHKKLAEL

SEQ ID NO: 439 - protein, 25 aa, Artificial Sequence
  Designed; as detailed elsewhere in present application
  MISC_FEATURE (1)..(25): Xaa is INDEPENDENTLY selected at each position from any amino acid or lack thereof (no amino acid at this position and so this position is not present)
  MISC_FEATURE (1)..(25): OPTIONALLY wherein one or more amino acids have a (independently selected in each case) lipid moiety covalently attached e.g. fatty acid, cholesterol etc.
  MISC_FEATURE (1)..(25): OPTIONALLY wherein there is a fatty acid acylated to this sequence's N-terminus
  MISC_FEATURE (1)..(25): OPTIONALLY one or more lysine residues (if present) have a fatty acid conjugated/acylated to their side-chain
XXXXXXXXXXXXXXXXXXXXXXXXX

SEQ ID NO: 440 - protein, 14 aa, Artificial Sequence
  Cell Penetrating Peptide (CPP) sequence
YGRKKRRQRRRPPQ

SEQ ID NO: 441 - protein, 13 aa, Artificial Sequence
  Cell Penetrating Peptide (CPP) sequence
GRKKRRQRRRPPQ

SEQ ID NO: 442 - protein, 11 aa, Artificial Sequence
  Cell Penetrating Peptide (CPP) sequence
YGRKKRRQRRR

SEQ ID NO: 443 - protein, 10 aa, Artificial Sequence
  Cell Penetrating Peptide (CPP) sequence
GRKKRRQRRR

SEQ ID NO: 444 - protein, 9 aa, Artificial Sequence
  Cell Penetrating Peptide (CPP) sequence
RKKRRQRRR

SEQ ID NO: 445 - protein, 13 aa, Artificial Sequence
  Cell Penetrating Peptide (CPP) sequence
GYGRKKRRQRRRG

SEQ ID NO: 446 - protein, 12 aa, Artificial Sequence
  Cell Penetrating Peptide (CPP) sequence
YGRKKRRQRRRG

SEQ ID NO: 447 - protein, 12 aa, Artificial Sequence
  Cell Penetrating Peptide (CPP) sequence
GRKKRRQRRRPP

SEQ ID NO: 448 - protein, 13 aa, Artificial Sequence
  Cell Penetrating Peptide (CPP) sequence
YGRKKRRQRRRPP

SEQ ID NO: 449 - protein, 12 aa, Artificial Sequence
  Cell Penetrating Peptide (CPP) sequence
CYGRKKRRQRRR

SEQ ID NO: 450 - protein, 10 aa, Artificial Sequence
  Cell Penetrating Peptide (CPP) sequence
CRKKRRQRRR

SEQ ID NO: 451 - protein, 12 aa, Artificial Sequence
  Cell Penetrating Peptide (CPP) sequence
  MISC_FEATURE (1)..(12): Optionally wherein one or more of the amino-acids are corresponding D-amino acids
PPRRRQRRKKRG

SEQ ID NO: 452 - protein, 22 aa, Artificial Sequence
  Cell Penetrating Peptide (CPP) sequence
YGRKKRRQRRRLLRAALRKAAL

SEQ ID NO: 453 - protein, 13 aa, Artificial Sequence
  Cell Penetrating Peptide (CPP) sequence
GRRRRRRRRRPPQ

SEQ ID NO: 454 - protein, 11 aa, Artificial Sequence
  Cell Penetrating Peptide (CPP) sequence
YARAAARQARA

SEQ ID NO: 455 - protein, 7 aa, Artificial Sequence
  Cell Penetrating Peptide (CPP) sequence
RRRRRRR

SEQ ID NO: 456 - protein, 8 aa, Artificial Sequence
  Cell Penetrating Peptide (CPP) sequence
RRRRRRRR

SEQ ID NO: 457 - protein, 11 aa, Artificial Sequence
  Cell Penetrating Peptide (CPP) sequence
RRRRRRRRRRR

SEQ ID NO: 458 - protein, 8 aa, Artificial Sequence
  Cell Penetrating Peptide (CPP) sequence
RRRRRRRC

SEQ ID NO: 459 - protein, 9 aa, Artificial Sequence
  Cell Penetrating Peptide (CPP) sequence
  MISC_FEATURE (1)..(9): Optionally wherein one or more of the amino-acids are corresponding D-amino acids
RRRRRRRCC

SEQ ID NO: 460 - protein, 7 aa, Artificial Sequence
  Cell Penetrating Peptide (CPP) sequence
  MISC_FEATURE (2)..(2): D-amino acid
  MISC_FEATURE (4)..(4): D-amino acid
  MISC_FEATURE (6)..(6): D-amino acid
RRRRRRR

SEQ ID NO: 461 - protein, 8 aa, Artificial Sequence
  Cell Penetrating Peptide (CPP) sequence
RRRRRRRG

SEQ ID NO: 462 - protein, 9 aa, Artificial Sequence
  Cell Penetrating Peptide (CPP) sequence
RRWWRRWRR

SEQ ID NO: 463 - protein, 16 aa, Artificial Sequence
  Cell Penetrating Peptide (CPP) sequence
RQIKIWFQNRRMKWKK

SEQ ID NO: 464 - protein, 7 aa, Artificial Sequence
  Cell Penetrating Peptide (CPP) sequence
RRMKWKK

SEQ ID NO: 465 - protein, 8 aa, Artificial Sequence
  Cell Penetrating Peptide (CPP) sequence
NRRMKWKK

SEQ ID NO: 466 - protein, 9 aa, Artificial Sequence
  Cell Penetrating Peptide (CPP) sequence
QNRRMKWKK

SEQ ID NO: 467 - protein, 17 aa, Artificial Sequence
  Cell Penetrating Peptide (CPP) sequence
CRQIKIWFQNRRMKWKK

SEQ ID NO: 468 - protein, 16 aa, Artificial Sequence
  Cell Penetrating Peptide (CPP) sequence
  MISC_FEATURE (1)..(16): Optionally wherein one or more of the amino-acids are corresponding D-amino acids
KKWKMRRNQFWVKVQR

SEQ ID NO: 469 - protein, 34 aa, Artificial Sequence
  Cell Penetrating Peptide (CPP) sequence
DAATATRGRSAASRPTERPRAPARSASRPRRPWD

SEQ ID NO: 470 - protein, 16 aa, Artificial Sequence
  Cell Penetrating Peptide (CPP) sequence
RKKRRRESRKKRRRES

SEQ ID NO: 471 - protein, 17 aa, Artificial Sequence
  Cell Penetrating Peptide (CPP) sequence
GRPRESGKKRKRKRLKP

SEQ ID NO: 472 - protein, 20 aa, Artificial Sequence
  Cell Penetrating Peptide (CPP) sequence
CVKRGLKLRHVRPRVTRMDV

SEQ ID NO: 473 - protein, 19 aa, Artificial Sequence
  Cell Penetrating Peptide (CPP) sequence
VKRGLKLRHVRPRVTRMDV

SEQ ID NO: 474 - protein, 18 aa, Artificial Sequence
  Cell Penetrating Peptide (CPP) sequence
LLIILRRRIRKQAHAHSK

SEQ ID NO: 475 - protein, 22 aa, Artificial Sequence
  Cell Penetrating Peptide (CPP) sequence
MVRRFLVTLRIRRACGPPRVRV

SEQ ID NO: 476 - protein, 13 aa, Artificial Sequence
  Cell Penetrating Peptide (CPP) sequence
RVRVFVVHIPRLT

SEQ ID NO: 477 - protein, 27 aa, Artificial Sequence
  Cell Penetrating Peptide (CPP) sequence
GALFLGFLGAAGSTMGAWSQPKKKRKV

SEQ ID NO: 478 - protein, 18 aa, Artificial Sequence
  Cell Penetrating Peptide (CPP) sequence
KLALKLALKALKAALKLA

SEQ ID NO: 479 - protein, 27 aa, Artificial Sequence
  Cell Penetrating Peptide (CPP) sequence
GWTLNSAGYLLGKINLKALAALAKKIL

SEQ ID NO: 480 - protein, 22 aa, Artificial Sequence
  Cell Penetrating Peptide (CPP) sequence
AGYLIGKINLKALIAALAKKIL

SEQ ID NO: 481 - protein, 12 aa, Artificial Sequence
  Cell Penetrating Peptide (CPP) sequence
GWTLNSAGYLLG

SEQ ID NO: 482 - protein, 15 aa, Artificial Sequence
  Cell Penetrating Peptide (CPP) sequence
INLKALIAALAKKIL

SEQ ID NO: 483 - protein, 5 aa, Artificial Sequence
  Cell Penetrating Peptide (CPP) sequence
VSALK

SEQ ID NO: 484 - protein, 16 aa, Artificial Sequence
  Cell Penetrating Peptide (CPP) sequence
CSIPPEVKFNPFVYLI

SEQ ID NO: 485 - protein, 26 aa, Artificial Sequence
  Cell Penetrating Peptide (CPP) sequence
GIGAVLKVLTTGLPALISWIKRKRQQ

SEQ ID NO: 486 - protein, 20 aa, Artificial Sequence
  Cell Penetrating Peptide (CPP) sequence
HGLASTLTRWAHYNALIRAF

SEQ ID NO: 487 - protein, 21 aa, Artificial Sequence
  Cell Penetrating Peptide (CPP) sequence
KETWWETWWTEWSQPKKKRKV

SEQ ID NO: 488 - protein, 15 aa, Artificial Sequence
  Cell Penetrating Peptide (CPP) sequence
SDLWEMMMVSLACQY

SEQ ID NO: 489 - protein, 28 aa, Artificial Sequence
  Cell Penetrating Peptide (CPP) sequence
MVKSKIGSWILVLFVAMWSDVGLCKKRP

SEQ ID NO: 490 - protein, 28 aa, Artificial Sequence
  Cell Penetrating Peptide (CPP) sequence
LSTAADMQGVVTDGMASGLDKDYLKPDD

SEQ ID NO: 491 - protein, 26 aa, Artificial Sequence
  Cell Penetrating Peptide (CPP) sequence
DPKGDPKGVTVTVTVTVTGKGDPKPD

SEQ ID NO: 492 - protein, 24 aa, Artificial Sequence
  Cell Penetrating Peptide (CPP) sequence
RRIRPRPPRLPRPRPRPLPFPRPG

SEQ ID NO: 493 - protein, 6 aa, Artificial Sequence
  Cell Penetrating Peptide (CPP) sequence
PFVYLI

SEQ ID NO: 494 - protein, 13 aa, Artificial Sequence
  Cell Penetrating Peptide (CPP) sequence
CGYGPKKKRKVGG

SEQ ID NO: 495 - protein, 30 aa, Artificial Sequence
  Cell Penetrating Peptide (CPP) sequence
WEAKLAKALAKALAKHLAKALAKALKACEA

SEQ ID NO: 496 - protein, 27 aa, Artificial Sequence
  Cell Penetrating Peptide (CPP) sequence
MGLGLHLLVLAAALQGAWSQPKKKRKV

SEQ ID NO: 497 - protein, 24 aa, Artificial Sequence
  Cell Penetrating Peptide (CPP) sequence
LGTYTQDFNKFHTFPQTAIGVGAP

SEQ ID NO: 498 - protein, 18 aa, Artificial Sequence
  Cell Penetrating Peptide (CPP) sequence
RGGRLSYSRRRFSTSTGR

SEQ ID NO: 499 - protein, 10 aa, Artificial Sequence
  Cell Penetrating Peptide (CPP) sequence
RRLSYSRRRF

SEQ ID NO: 500 - protein, 17 aa, Artificial Sequence
  Cell Penetrating Peptide (CPP) sequence
AWSFRWSYRGISYRRSR

SEQ ID NO: 501 - protein, 7 aa, Artificial Sequence
  Cell Penetrating Peptide (CPP) sequence
PKKKRKW

SEQ ID NO: 502 - protein, 18 aa, Artificial Sequence
  Cell Penetrating Peptide (CPP) sequence
WRLPPPWRLPPPWRLPPP

SEQ ID NO: 503 - protein, 16 aa, Artificial Sequence
  Cell Penetrating Peptide (CPP) sequence
RVIRVWFQNKRCKDKK

SEQ ID NO: 504 - protein, 30 aa, Artificial Sequence
  Cell Penetrating Peptide (CPP) sequence
WEAAIAEALAEALAEHLAEALAEALEALAA

SEQ ID NO: 505 - protein, 9 aa, Artificial Sequence
  Cell Penetrating Peptide (CPP) sequence
WQRKRQKLM

SEQ ID NO: 506 - protein, 16 aa, Artificial Sequence
  Cell Penetrating Peptide (CPP) sequence
RVIRVWFQNKRCKDKK

SEQ ID NO: 507 - protein, 26 aa, Artificial Sequence
  Cell Penetrating Peptide (CPP) sequence
DPKGDPKGWTWTVTWTVTGKGDPKPD

SEQ ID NO: 508 - protein, 12 aa, Artificial Sequence
  Cell Penetrating Peptide (CPP) sequence
TSPLNIHNGQKL

SEQ ID NO: 509 - protein, 11 aa, Artificial Sequence
  Cell Penetrating Peptide (CPP) sequence
WPMILKPMLKE

SEQ ID NO: 510 - protein, 21 aa, Artificial Sequence
  Cell Penetrating Peptide (CPP) sequence
TRSSRAGLQFPWGRVHRLLRK

SEQ ID NO: 511 - protein, 24 aa, Artificial Sequence
  Cell Penetrating Peptide (CPP) sequence
LGTYTQDFNKFHTFPQTAIGVGAP

SEQ ID NO: 512 - protein, 24 aa, Artificial Sequence
  Cell Penetrating Peptide (CPP) sequence
  MISC_FEATURE (1)..(2): INDEPENDENTLY selected at each position from: Gly Pro or is absent (no amino acid at this position and so this position is not present)
  MISC_FEATURE (3)..(22): INDEPENDENTLY selected at each position from: L- or D- Arg/Lys/Phe/Trp/Tyr/Gln/phenylglycine/diphenylalanine/cyclohexyla lanine/3-2- or 3-1-naphthylalanine/aminooctanoic acid/O-Methyltyrosine/2,6-dimethyltyrosine or absent
  MISC_FEATURE (23)..(24): INDEPENDENTLY selected at each position from: Gly Pro or is absent (no amino acid at this position and so this position is not present)
XXXXXXXXXXXXXXXXXXXXXXXX

SEQ ID NO: 513 - protein, 24 aa, Artificial Sequence
  Cell Penetrating Peptide (CPP) sequence
  MISC_FEATURE (1)..(2): INDEPENDENTLY selected at each position from: Gly Pro or is absent (no amino acid at this position and so this position is not present)
  MISC_FEATURE (3)..(22): INDEPENDENTLY selected at each position from: L- or D- Arg/Lys/Phe/Trp/diphenylalanine/cyclohexylalanine/3-2- or 3-1-naphthylalanine/aminooctanoic acid/2,6-dimethyltyrosine or absent
  MISC_FEATURE (23)..(24): INDEPENDENTLY selected at each position from: Gly Pro or is absent (no amino acid at this position and so this position is not present)
XXXXXXXXXXXXXXXXXXXXXXXX

SEQ ID NO: 514 - protein, 24 aa, Artificial Sequence
  Cell Penetrating Peptide (CPP) sequence
  MISC_FEATURE (1)..(2): INDEPENDENTLY selected at each position from: Gly Pro or is absent (no amino acid at this position and so this position is not present)
  MISC_FEATURE (3)..(22): INDEPENDENTLY selected at each position from: L- or D- Arg/Phe/diphenylalanine/cyclohexylalanine/3-2- or 3-1-naphthylalanine/aminooctanoic acid/2,6-dimethyltyrosine or absent
  MISC_FEATURE (23)..(24): INDEPENDENTLY selected at each position from: Gly Pro or is absent (no amino acid at this position and so this position is not present)
XXXXXXXXXXXXXXXXXXXXXXXX

SEQ ID NO: 515 - protein, 24 aa, Artificial Sequence
  Cell Penetrating Peptide (CPP) sequence
  MISC_FEATURE (1)..(2): INDEPENDENTLY selected at each position from: Gly Pro or is absent (no amino acid at this position and so this position is not present)
  MISC_FEATURE (3)..(22): INDEPENDENTLY selected at each position from: L- or D- Arg/Phe/diphenylalanine/cyclohexylalanine/3-2- or 3-1-naphthylalanine/2,6-dimethyltyrosine or absent
  MISC_FEATURE (23)..(24): INDEPENDENTLY selected at each position from: Gly Pro or is absent (no amino acid at this position and so this position is not present)
XXXXXXXXXXXXXXXXXXXXXXXX

SEQ ID NO: 516 - protein, 24 aa, Artificial Sequence
  Cell Penetrating Peptide (CPP) sequence
  MISC_FEATURE (1)..(2): INDEPENDENTLY selected at each position from: Gly Pro or is absent (no amino acid at this position and so this position is not present)
  MISC_FEATURE (3)..(22): INDEPENDENTLY selected at each position from: L- or D- Arg/diphenylalanine/cyclohexylalanine/3-2- or 3-1-naphthylalanine/2,6-dimethyltyrosine or absent
  MISC_FEATURE (23)..(24): INDEPENDENTLY selected at each position from: Gly Pro or is absent (no amino acid at this position and so this position is not present)
XXXXXXXXXXXXXXXXXXXXXXXX

SEQ ID NO: 517 - protein, 24 aa, Artificial Sequence
  Cell Penetrating Peptide (CPP) sequence
  MISC_FEATURE (1)..(2): INDEPENDENTLY selected at each position from: Gly Pro or is absent (no amino acid at this position and so this position is not present)
  MISC_FEATURE (3)..(22): INDEPENDENTLY selected at each position from: L- or D- Arg/diphenylalanine/3-2- or 3-1-naphthylalanine/2,6-dimethyltyrosine or absent
  MISC_FEATURE (23)..(24): INDEPENDENTLY selected at each position from: Gly Pro or is absent (no amino acid at this position and so this position is not present)
XXXXXXXXXXXXXXXXXXXXXXXX

SEQ ID NO: 518 - protein, 24 aa, Artificial Sequence
  Cell Penetrating Peptide (CPP) sequence
  MISC_FEATURE (1)..(2): INDEPENDENTLY selected at each position from: Gly Pro or is absent (no amino acid at this position and so this position is not present)
  MISC_FEATURE (3)..(22): INDEPENDENTLY selected at each position from: L-arginine or D-arginine or 2,6-dimethyl-L-tyrosine or 2,6-dimethyl-D-tyrosine
  MISC_FEATURE (23)..(24): INDEPENDENTLY selected at each position from: Gly Pro or is absent (no amino acid at this position and so this position is not present)
XXXXXXXXXXXXXXXXXXXXXXXX

SEQ ID NO: 519 - protein, 24 aa, Artificial Sequence
  Cell Penetrating Peptide (CPP) sequence
  MISC_FEATURE (1)..(2): INDEPENDENTLY selected at each position from: Gly Pro or is absent (no amino acid at this position and so this position is not present)
  MISC_FEATURE (3)..(22): INDEPENDENTLY selected at each position from: L- or D- Arg/3-2- or 3-1-naphthylalanine, 3,3-diphenyl-L-alanine, 3,3-diphenyl-D-alanine, or absent
  MISC_FEATURE (23)..(24): INDEPENDENTLY selected at each position from: Gly Pro or is absent (no amino acid at this position and so this position is not present)
XXXXXXXXXXXXXXXXXXXXXXXX

SEQ ID NO: 520 - protein, 24 aa, Artificial Sequence
  Cell Penetrating Peptide (CPP) sequence
  MISC_FEATURE (1)..(2): INDEPENDENTLY selected at each position from: Gly Pro or is absent (no amino acid at this position and so this position is not present)
  MISC_FEATURE (3)..(22): INDEPENDENTLY selected at each position from: L-arginine, D-arginine, L-phenylalanine, D-phenylalanine or absent
  MISC_FEATURE (23)..(24): INDEPENDENTLY selected at each position from: Gly Pro or is absent (no amino acid at this position and so this position is not present)
XXXXXXXXXXXXXXXXXXXXXXXX

SEQ ID NO: 521 - protein, 56 aa, Artificial Sequence
  Cell Penetrating Peptide (CPP) sequence
  MISC_FEATURE (1)..(28): INDEPENDENTLY selected at each position from: L- or D- diphenylalanine/cyclohexylalanine/3-2- or 3-1-naphthylalanine/2-aminooctanoic acid/2,6-dimethyltyrosine or absent
  MISC_FEATURE (29)..(56): INDEPENDENTLY selected at each position from: L-arginine or D-arginine or absent
XXXXXXXXXXXXXXXXXXXXXXXXXXXXXXXXXXXXXXXXXXXXXXXXXXXXXXXX

SEQ ID NO: 522 - protein, 56 aa, Artificial Sequence; identical to SEQ ID NO: 521
  Cell Penetrating Peptide (CPP) sequence
  MISC_FEATURE (1)..(1): L- or D- diphenylalanine/cyclohexylalanine/3-2- or 3-1-naphthylalanine/2-aminooctanoic acid/2,6-dimethyltyrosine or absent
  MISC_FEATURE (2)..(2): L-arginine or D-arginine or absent
  MISC_FEATURE (3)..(3): L- or D- diphenylalanine/cyclohexylalanine/3-2- or 3-1-naphthylalanine/2-aminooctanoic acid/2,6-dimethyltyrosine or absent
  MISC_FEATURE (4)..(4): L-arginine or D-arginine or absent
  MISC_FEATURE (5)..(5): L- or D- diphenylalanine/cyclohexylalanine/3-2- or 3-1-naphthylalanine/2-aminooctanoic acid/2,6-dimethyltyrosine or absent
  MISC_FEATURE (6)..(6): L-arginine or D-arginine or absent
  MISC_FEATURE (7)..(7): L- or D- diphenylalanine/cyclohexylalanine/3-2- or 3-1-naphthylalanine/2-aminooctanoic acid/2,6-dimethyltyrosine or absent
  MISC_FEATURE (8)..(8): L-arginine or D-arginine or absent
  MISC_FEATURE (9)..(9): L- or D- diphenylalanine/cyclohexylalanine/3-2- or 3-1-naphthylalanine/2-aminooctanoic acid/2,6-dimethyltyrosine or absent
  MISC_FEATURE (10)..(10): L-arginine or D-arginine or absent
  MISC_FEATURE (11)..(11): L- or D- diphenylalanine/cyclohexylalanine/3-2- or 3-1-naphthylalanine/2-aminooctanoic acid/2,6-dimethyltyrosine or absent
  MISC_FEATURE (12)..(12): L-arginine or D-arginine or absent
  MISC_FEATURE (13)..(13): L- or D- diphenylalanine/cyclohexylalanine/3-2- or 3-1-naphthylalanine/2-aminooctanoic acid/2,6-dimethyltyrosine or absent
  MISC_FEATURE (14)..(14): L-arginine or D-arginine or absent
  MISC_FEATURE (15)..(15): L- or D- diphenylalanine/cyclohexylalanine/3-2- or 3-1-naphthylalanine/2-aminooctanoic acid/2,6-dimethyltyrosine or absent
  MISC_FEATURE (16)..(16): L-arginine or D-arginine or absent
  MISC_FEATURE (17)..(17): L- or D- diphenylalanine/cyclohexylalanine/3-2- or 3-1-naphthylalanine/2-aminooctanoic acid/2,6-dimethyltyrosine or absent
  MISC_FEATURE (18)..(18): L-arginine or D-arginine or absent
  MISC_FEATURE (19)..(19): L- or D- diphenylalanine/cyclohexylalanine/3-2- or 3-1-naphthylalanine/2-aminooctanoic acid/2,6-dimethyltyrosine or absent
  MISC_FEATURE (20)..(20): L-arginine or D-arginine or absent
  MISC_FEATURE (21)..(21): L- or D- diphenylalanine/cyclohexylalanine/3-2- or 3-1-naphthylalanine/2-aminooctanoic acid/2,6-dimethyltyrosine or absent
  MISC_FEATURE (22)..(22): L-arginine or D-arginine or absent
  MISC_FEATURE (23)..(23): L- or D- diphenylalanine/cyclohexylalanine/3-2- or 3-1-naphthylalanine/2-aminooctanoic acid/2,6-dimethyltyrosine or absent
  MISC_FEATURE (24)..(24): L-arginine or D-arginine or absent
  MISC_FEATURE (25)..(25): L- or D- diphenylalanine/cyclohexylalanine/3-2- or 3-1-naphthylalanine/2-aminooctanoic acid/2,6-dimethyltyrosine or absent
  MISC_FEATURE (26)..(26): L-arginine or D-arginine or absent
  MISC_FEATURE (27)..(27): L- or D- diphenylalanine/cyclohexylalanine/3-2- or 3-1-naphthylalanine/2-aminooctanoic acid/2,6-dimethyltyrosine or absent
  MISC_FEATURE (28)..(28): L-arginine or D-arginine or absent
  MISC_FEATURE (29)..(29): L- or D- diphenylalanine/cyclohexylalanine/3-2- or 3-1-naphthylalanine/2-aminooctanoic acid/2,6-dimethyltyrosine or absent
  MISC_FEATURE (30)..(30): L-arginine or D-arginine or absent
  MISC_FEATURE (31)..(31): L- or D- diphenylalanine/cyclohexylalanine/3-2- or 3-1-naphthylalanine/2-aminooctanoic acid/2,6-dimethyltyrosine or absent
  MISC_FEATURE (32)..(32): L-arginine or D-arginine or absent
  MISC_FEATURE (33)..(33): L- or D- diphenylalanine/cyclohexylalanine/3-2- or 3-1-naphthylalanine/2-aminooctanoic acid/2,6-dimethyltyrosine or absent
  MISC_FEATURE (34)..(34): L-arginine or D-arginine or absent
  MISC_FEATURE (35)..(35): L- or D- diphenylalanine/cyclohexylalanine/3-2- or 3-1-naphthylalanine/2-aminooctanoic acid/2,6-dimethyltyrosine or absent
  MISC_FEATURE (36)..(36): L-arginine or D-arginine or absent
  MISC_FEATURE (37)..(37): L- or D- diphenylalanine/cyclohexylalanine/3-2- or 3-1-naphthylalanine/2-aminooctanoic acid/2,6-dimethyltyrosine or absent
  MISC_FEATURE (38)..(38): L-arginine or D-arginine or absent
  MISC_FEATURE (39)..(39): L- or D- diphenylalanine/cyclohexylalanine/3-2- or 3-1-naphthylalanine/2-aminooctanoic acid/2,6-dimethyltyrosine or absent
  MISC_FEATURE (40)..(40): L-arginine or D-arginine or absent
  MISC_FEATURE (41)..(41): L- or D- diphenylalanine/cyclohexylalanine/3-2- or 3-1-naphthylalanine/2-aminooctanoic acid/2,6-dimethyltyrosine or absent
  MISC_FEATURE (42)..(42): L-arginine or D-arginine or absent
  MISC_FEATURE (43)..(43): L- or D- diphenylalanine/cyclohexylalanine/3-2- or 3-1-naphthylalanine/2-aminooctanoic acid/2,6-dimethyltyrosine or absent
  MISC_FEATURE (44)..(44): L-arginine or D-arginine or absent
  MISC_FEATURE (45)..(45): L- or D- diphenylalanine/cyclohexylalanine/3-2- or 3-1-naphthylalanine/2-aminooctanoic acid/2,6-dimethyltyrosine or absent
  MISC_FEATURE (46)..(46): L-arginine or D-arginine or absent
  MISC_FEATURE (47)..(47): L- or D- diphenylalanine/cyclohexylalanine/3-2- or 3-1-naphthylalanine/2-aminooctanoic acid/2,6-dimethyltyrosine or absent
  MISC_FEATURE (48)..(48): L-arginine or D-arginine or absent
  MISC_FEATURE (49)..(49): L- or D- diphenylalanine/cyclohexylalanine/3-2- or 3-1-naphthylalanine/2-aminooctanoic acid/2,6-dimethyltyrosine or absent
  MISC_FEATURE (50)..(50): L-arginine or D-arginine or absent
  MISC_FEATURE (51)..(51): L- or D- diphenylalanine/cyclohexylalanine/3-2- or 3-1-naphthylalanine/2-aminooctanoic acid/2,6-dimethyltyrosine or absent
  MISC_FEATURE (52)..(52): L-arginine or D-arginine or absent
  MISC_FEATURE (53)..(53): L- or D- diphenylalanine/cyclohexylalanine/3-2- or 3-1-naphthylalanine/2-aminooctanoic acid/2,6-dimethyltyrosine or absent
  MISC_FEATURE (54)..(54): L-arginine or D-arginine or absent
  MISC_FEATURE (55)..(55): L- or D- diphenylalanine/cyclohexylalanine/3-2- or 3-1-naphthylalanine/2-aminooctanoic acid/2,6-dimethyltyrosine or absent
  MISC_FEATURE (56)..(56): L-arginine or D-arginine or absent

SEQ ID NO: 523 - protein, 8 aa, Artificial Sequence
  Cell Penetrating Peptide (CPP) sequence
  MISC_FEATURE (1)..(1): L-3-cyclohexylalanine or D-3-cyclohexylalanine
  MISC_FEATURE (2)..(2): D-arginine
  MISC_FEATURE (3)..(3): L-3-cyclohexylalanine or D-3-cyclohexylalanine
  MISC_FEATURE (5)..(5): L-3-cyclohexylalanine or D-3-cyclohexylalanine
  MISC_FEATURE (6)..(6): D-arginine
  MISC_FEATURE (7)..(7): L-3-cyclohexylalanine or D-3-cyclohexylalanine
XXXKXXXK

SEQ ID NO: 524 - protein, 8 aa, Artificial Sequence
  Cell Penetrating Peptide (CPP) sequence
  MISC_FEATURE (1)..(1): L-3-cyclohexylalanine or D-3-cyclohexylalanine
  MISC_FEATURE (2)..(2): D-arginine
  MISC_FEATURE (3)..(3): L-3-cyclohexylalanine or D-3-cyclohexylalanine
  MISC_FEATURE (6)..(6): D-arginine
  MISC_FEATURE (7)..(7): L-3-cyclohexylalanine or D-3-cyclohexylalanine
XXXKFXXK

SEQ ID NO: 525 - protein, 8 aa, Artificial Sequence
  Cell Penetrating Peptide (CPP) sequence
  MISC_FEATURE (3)..(3): L-3-cyclohexylalanine or D-3-cyclohexylalanine
  MISC_FEATURE (5)..(5): L-3-cyclohexylalanine or D-3-cyclohexylalanine
  MISC_FEATURE (6)..(6): D-arginine
  MISC_FEATURE (7)..(7): L-3-cyclohexylalanine or D-3-cyclohexylalanine
  MISC_FEATURE (8)..(8): D-arginine
FKXKXXXX

SEQ ID NO: 526 - protein, 4 aa, Artificial Sequence
  Cell Penetrating Peptide (CPP) sequence
  MISC_FEATURE (1)..(1): L-3-cyclohexylalanine or D-3-cyclohexylalanine
  MISC_FEATURE (2)..(2): D-arginine
  MISC_FEATURE (3)..(3): L-3-cyclohexylalanine or D-3-cyclohexylalanine
XXXK

SEQ ID NO: 527 - protein, 4 aa, Artificial Sequence
  Cell Penetrating Peptide (CPP) sequence
  MISC_FEATURE (1)..(1): L-3-cyclohexylalanine or D-3-cyclohexylalanine
  MISC_FEATURE (2)..(2): L-3-cyclohexylalanine or D-3-cyclohexylalanine
  MISC_FEATURE (3)..(3): D-arginine
XXXK

SEQ ID NO: 528 - protein, 4 aa, Artificial Sequence
  Cell Penetrating Peptide (CPP) sequence
  MISC_FEATURE (1)..(1): L-3-cyclohexylalanine or D-3-cyclohexylalanine
  MISC_FEATURE (2)..(2): D-arginine
  MISC_FEATURE (3)..(3): L-3-cyclohexylalanine or D-3-cyclohexylalanine
XXXK

SEQ ID NO: 529 - protein, 4 aa, Artificial Sequence
  Cell Penetrating Peptide (CPP) sequence
  MISC_FEATURE (1)..(1): L-3-cyclohexylalanine or D-3-cyclohexylalanine
  MISC_FEATURE (2)..(2): D-arginine
  MISC_FEATURE (3)..(3): L-3-(1-naphthyl)alanine or D-3-(1-naphthyl)alanine or L-3-(2-naphthyl)alanine or D-3-(2-naphthyl)alanine
XXXK

SEQ ID NO: 530 - protein, 4 aa, Artificial Sequence
  Cell Penetrating Peptide (CPP) sequence
  MISC_FEATURE (1)..(1): L-3-cyclohexylalanine or D-3-cyclohexylalanine
  MISC_FEATURE (2)..(2): L-3-(1-naphthyl)alanine or D-3-(1-naphthyl)alanine or L-3-(2-naphthyl)alanine or D-3-(2-naphthyl)alanine
  MISC_FEATURE (3)..(3): D-arginine
XXXK

SEQ ID NO: 531 - protein, 4 aa, Artificial Sequence
  Cell Penetrating Peptide (CPP) sequence
  MISC_FEATURE (1)..(1): L-3-cyclohexylalanine or D-3-cyclohexylalanine
  MISC_FEATURE (2)..(2): D-arginine
  MISC_FEATURE (3)..(3): L-2-aminooctanoic acid or D-2-aminooctanoic acid
XXXK

SEQ ID NO: 532 - protein, 6 aa, Artificial Sequence
  Cell Penetrating Peptide (CPP) sequence
  MISC_FEATURE (1)..(1): L-3-cyclohexylalanine or D-3-cyclohexylalanine
  MISC_FEATURE (2)..(2): D-arginine
  MISC_FEATURE (3)..(3): L-3-cyclohexylalanine or D-3-cyclohexylalanine
  MISC_FEATURE (4)..(4): D-arginine
  MISC_FEATURE (5)..(5): L-3-cyclohexylalanine or D-3-cyclohexylalanine
  MISC_FEATURE (6)..(6): D-arginine
XXXXXX

SEQ ID NO: 533 - protein, 8 aa, Artificial Sequence
  Cell Penetrating Peptide (CPP) sequence
  MISC_FEATURE (1)..(1): L-3-cyclohexylalanine or D-3-cyclohexylalanine
  MISC_FEATURE (2)..(2): D-arginine
  MISC_FEATURE (3)..(3): L-3-cyclohexylalanine or D-3-cyclohexylalanine
  MISC_FEATURE (4)..(4): D-arginine
  MISC_FEATURE (5)..(5): L-3-cyclohexylalanine or D-3-cyclohexylalanine
  MISC_FEATURE (6)..(6): D-arginine
  MISC_FEATURE (7)..(7): L-3-cyclohexylalanine or D-3-cyclohexylalanine
  MISC_FEATURE (8)..(8): D-arginine
XXXXXXXX

SEQ ID NO: 534 - protein, 8 aa, Artificial Sequence
  Cell Penetrating Peptide (CPP) sequence
  MISC_FEATURE (2)..(2): D-arginine
  MISC_FEATURE (6)..(6): D-arginine
FXFKFXFK

SEQ ID NO: 535 - protein, 8 aa, Artificial Sequence
  Cell Penetrating Peptide (CPP) sequence
  MISC_FEATURE (2)..(2): D-arginine
  MISC_FEATURE (3)..(3): L-3-cyclohexylalanine or D-3-cyclohexylalanine
  MISC_FEATURE (6)..(6): D-arginine
  MISC_FEATURE (7)..(7): L-3-cyclohexylalanine or D-3-cyclohexylalanine
FXXKFXXK

SEQ ID NO: 536 - protein, 8 aa, Artificial Sequence
  Cell Penetrating Peptide (CPP) sequence
  MISC_FEATURE (1)..(1): L-3-cyclohexylalanine or D-3-cyclohexylalanine
  MISC_FEATURE (4)..(4): D-arginine
  MISC_FEATURE (7)..(7): L-3-cyclohexylalanine or D-3-cyclohexylalanine
  MISC_FEATURE (8)..(8): D-arginine
XKFXFKXX

SEQ ID NO: 537 - protein, 8 aa, Artificial Sequence
  Cell Penetrating Peptide (CPP) sequence
  MISC_FEATURE (2)..(2): D-arginine
  MISC_FEATURE (6)..(6): D-arginine
FXYKFXYK

SEQ ID NO: 538 - protein, 4 aa, Artificial Sequence
  Cell Penetrating Peptide (CPP) sequence
  MISC_FEATURE (1)..(1): L-3-cyclohexylalanine or D-3-cyclohexylalanine
  MISC_FEATURE (2)..(2): D-arginine
  MISC_FEATURE (3)..(3): L-3-cyclohexylalanine or D-3-cyclohexylalanine
XXXK

SEQ ID NO: 539 - protein, 4 aa, Artificial Sequence
  Cell Penetrating Peptide (CPP) sequence
  MISC_FEATURE (2)..(2): D-arginine
  MISC_FEATURE (3)..(3): L-3-cyclohexylalanine or D-3-cyclohexylalanine
  MISC_FEATURE (4)..(4): L-3-cyclohexylalanine or D-3-cyclohexylalanine
KXXX

SEQ ID NO: 540 - protein, 4 aa, Artificial Sequence
  Cell Penetrating Peptide (CPP) sequence
  MISC_FEATURE (2)..(2): D-arginine
FXFK

SEQ ID NO: 541 - protein, 4 aa, Artificial Sequence
  Cell Penetrating Peptide (CPP) sequence
  MISC_FEATURE (2)..(2): D-arginine
  MISC_FEATURE (3)..(3): L-3-cyclohexylalanine or D-3-cyclohexylalanine
FXXK

SEQ ID NO: 542 - protein, 4 aa, Artificial Sequence
  Cell Penetrating Peptide (CPP) sequence
  MISC_FEATURE (2)..(2): D-arginine
  MISC_FEATURE (3)..(3): 3,3-diphenyl-L-alanine or 3,3-diphenyl-D-alanine
FXXK

SEQ ID NO: 543 - protein, 4 aa, Artificial Sequence
  Cell Penetrating Peptide (CPP) sequence
  MISC_FEATURE (1)..(1): 3,3-diphenyl-L-alanine or 3,3-diphenyl-D-alanine
  MISC_FEATURE (4)..(4): D-arginine
XKFX

SEQ ID NO: 544 - protein, 4 aa, Artificial Sequence
  Cell Penetrating Peptide (CPP) sequence
  MISC_FEATURE (2)..(2): D-arginine
  MISC_FEATURE (3)..(3): L-3-(1-naphthyl)alanine or D-3-(1-naphthyl)alanine or L-3-(2-naphthyl)alanine or D-3-(2-naphthyl)alanine
FXXK

SEQ ID NO: 545 - protein, 4 aa, Artificial Sequence
  Cell Penetrating Peptide (CPP) sequence
  MISC_FEATURE (2)..(2): D-arginine
  MISC_FEATURE (3)..(3): L-2-aminooctanoic acid or D-2-aminooctanoic acid
FXXK

SEQ ID NO: 546 - protein, 4 aa, Artificial Sequence
  Cell Penetrating Peptide (CPP) sequence
  MISC_FEATURE (2)..(2): D-arginine
  MISC_FEATURE (3)..(3): O-Methyl-L-tyrosine or O-Methyl-D-tyrosine
FXXK

SEQ ID NO: 547 - protein, 5 aa, Artificial Sequence
  Cell Penetrating Peptide (CPP) sequence
  MISC_FEATURE (2)..(2): D-arginine
FXFFK

SEQ ID NO: 548 - protein, 4 aa, Artificial Sequence
  Cell Penetrating Peptide (CPP) sequence
  MISC_FEATURE (2)..(2): D-arginine
FXYK

SEQ ID NO: 549 - protein, 4 aa, Artificial Sequence
  Cell Penetrating Peptide (CPP) sequence
  MISC_FEATURE (2)..(2): D-arginine
YXYK

SEQ ID NO: 550 - protein, 12 aa, Artificial Sequence
  Cell Penetrating Peptide (CPP) sequence
  MISC_FEATURE (1)..(1): L-3-cyclohexylalanine or D-3-cyclohexylalanine
  MISC_FEATURE (2)..(2): D-arginine
  MISC_FEATURE (4)..(4): D-arginine
  MISC_FEATURE (5)..(5): L-3-cyclohexylalanine or D-3-cyclohexylalanine
  MISC_FEATURE (6)..(6): D-arginine
  MISC_FEATURE (8)..(8): D-arginine
  MISC_FEATURE (9)..(9): L-3-cyclohexylalanine or D-3-cyclohexylalanine
  MISC_FEATURE (10)..(10): D-arginine
  MISC_FEATURE (12)..(12): D-arginine
XXGXXXGXXXGX

SEQ ID NO: 551 - protein, 6 aa, Artificial Sequence
  Cell Penetrating Peptide (CPP) sequence
  MISC_FEATURE (2)..(2): L-3-(1-naphthyl)alanine or D-3-(1-naphthyl)alanine or L-3-(2-naphthyl)alanine or D-3-(2-naphthyl)alanine
FXRRRR

SEQ ID NO: 552 - protein, 6 aa, Artificial Sequence
  Cell Penetrating Peptide (CPP) sequence
  MISC_FEATURE (5)..(5): L-3-(1-naphthyl)alanine or D-3-(1-naphthyl)alanine or L-3-(2-naphthyl)alanine or D-3-(2-naphthyl)alanine
RRRRXF

SEQ ID NO: 553 - protein, 6 aa, Artificial Sequence
  Cell Penetrating Peptide (CPP) sequence
  MISC_FEATURE (5)..(5): L-3-(1-naphthyl)alanine or D-3-(1-naphthyl)alanine or L-3-(2-naphthyl)alanine or D-3-(2-naphthyl)alanine
RRFRXR

SEQ ID NO: 554 - protein, 6 aa, Artificial Sequence
  Cell Penetrating Peptide (CPP) sequence
  MISC_FEATURE: L-3-(1-naphthyl)alanine or D-3-(1-naphthyl)alanine or L-3-(2-naphthyl)alanine or D-3-(2-naphthyl)alanine
  MISC_FEATURE (2)..(2): L-3-(1-naphthyl)alanine or D-3-(1-naphthyl)alanine or L-3-(2-naphthyl)alanine or D-3-(2-naphthyl)alanine
RXRFRR

SEQ ID NO: 555 - protein, 5 aa, Artificial Sequence
  Cell Penetrating Peptide (CPP) sequence
  MISC_FEATURE (2)..(2): L-3-(1-naphthyl)alanine or D-3-(1-naphthyl)alanine or L-3-(2-naphthyl)alanine or D-3-(2-naphthyl)alanine
FXRRR

SEQ ID NO: 556 - protein, 5 aa, Artificial Sequence
  Cell Penetrating Peptide (CPP) sequence
  MISC_FEATURE (4)..(4): L-3-(1-naphthyl)alanine or D-3-(1-naphthyl)alanine or L-3-(2-naphthyl)alanine or D-3-(2-naphthyl)alanine
RRRXF

SEQ ID NO: 557 - protein, 7 aa, Artificial Sequence
  Cell Penetrating Peptide (CPP) sequence
  MISC_FEATURE (2)..(2): L-3-(1-naphthyl)alanine or D-3-(1-naphthyl)alanine or L-3-(2-naphthyl)alanine or D-3-(2-naphthyl)alanine
FXRRRRR

SEQ ID NO: 558 - protein, 7 aa, Artificial Sequence
  Cell Penetrating Peptide (CPP) sequence
  MISC_FEATURE (6)..(6): L-3-(1-naphthyl)alanine or D-3-(1-naphthyl)alanine or L-3-(2-naphthyl)alanine or D-3-(2-naphthyl)alanine
RRRRRXF

SEQ ID NO: 559 - protein, 7 aa, Artificial Sequence
  Cell Penetrating Peptide (CPP) sequence
  MISC_FEATURE (3)..(3): L-3-(1-naphthyl)alanine or D-3-(1-naphthyl)alanine or L-3-(2-naphthyl)alanine or D-3-(2-naphthyl)alanine
FFXRRRR

SEQ ID NO: 560 - protein, 7 aa, Artificial Sequence
  Cell Penetrating Peptide (CPP) sequence
  MISC_FEATURE (5)..(5): L-3-(1-naphthyl)alanine or D-3-(1-naphthyl)alanine or L-3-(2-naphthyl)alanine or D-3-(2-naphthyl)alanine
RRRRXFF

SEQ ID NO: 561 - protein, 7 aa, Artificial Sequence
  Cell Penetrating Peptide (CPP) sequence
  MISC_FEATURE (6)..(6): L-3-(1-naphthyl)alanine or D-3-(1-naphthyl)alanine or L-3-(2-naphthyl)alanine or D-3-(2-naphthyl)alanine
RFRFRXR

SEQ ID NO: 562 - protein, 7 aa, Artificial Sequence
  Cell Penetrating Peptide (CPP) sequence
  MISC_FEATURE (2)..(2): L-3-(1-naphthyl)alanine or D-3-(1-naphthyl)alanine or L-3-(2-naphthyl)alanine or D-3-(2-naphthyl)alanine
RXRFRFR

SEQ ID NO: 563 - protein, 6 aa, Artificial Sequence
  Cell Penetrating Peptide (CPP) sequence
  MISC_FEATURE (1)..(1): D-phenylalanine
  MISC_FEATURE (2)..(2): L-3-(1-naphthyl)alanine or D-3-(1-naphthyl)alanine or L-3-(2-naphthyl)alanine or D-3-(2-naphthyl)alanine
  MISC_FEATURE (4)..(4): D-arginine
  MISC_FEATURE (6)..(6): D-arginine
XXRXRX

SEQ ID NO: 564 - protein, 6 aa, Artificial Sequence
  Cell Penetrating Peptide (CPP) sequence
  MISC_FEATURE (1)..(1): D-arginine
  MISC_FEATURE (3)..(3): D-arginine
  MISC_FEATURE (5)..(5): L-3-(1-naphthyl)alanine or D-3-(1-naphthyl)alanine or L-3-(2-naphthyl)alanine or D-3-(2-naphthyl)alanine
  MISC_FEATURE (6)..(6): D-phenylalanine
XRXRXX

SEQ ID NO: 565 - protein, 7 aa, Artificial Sequence
  Cell Penetrating Peptide (CPP) sequence
  MISC_FEATURE (1)..(1): D-phenylalanine
  MISC_FEATURE (2)..(2): L-3-(1-naphthyl)alanine or D-3-(1-naphthyl)alanine or L-3-(2-naphthyl)alanine or D-3-(2-naphthyl)alanine
  MISC_FEATURE (4)..(4): D-arginine
  MISC_FEATURE (6)..(6): D-arginine
XXRXRXR

SEQ ID NO: 566 - protein, 7 aa, Artificial Sequence
  Cell Penetrating Peptide (CPP) sequence
  MISC_FEATURE (2)..(2): D-arginine
  MISC_FEATURE (4)..(4): D-arginine
  MISC_FEATURE (6)..(6): L-3-(1-naphthyl)alanine or D-3-(1-naphthyl)alanine or L-3-(2-naphthyl)alanine or D-3-(2-naphthyl)alanine
  MISC_FEATURE (7)..(7): D-phenylalanine
RXRXRXX

SEQ ID NO: 567 - protein, 7 aa, Artificial Sequence
  Cell Penetrating Peptide (CPP) sequence
  MISC_FEATURE (2)..(2): D-phenylalanine
  MISC_FEATURE (3)..(3): L-3-(1-naphthyl)alanine or D-3-(1-naphthyl)alanine or L-3-(2-naphthyl)alanine or D-3-(2-naphthyl)alanine
  MISC_FEATURE (5)..(7): D-arginine
FXXRXRX

SEQ ID NO: 568 - protein, 7 aa, Artificial Sequence
  Cell Penetrating Peptide (CPP) sequence
  MISC_FEATURE (1)..(1): D-arginine
  MISC_FEATURE (3)..(3): D-arginine
  MISC_FEATURE (5)..(5): L-3-(1-naphthyl)alanine or D-3-(1-naphthyl)alanine or L-3-(2-naphthyl)alanine or D-3-(2-naphthyl)alanine
  MISC_FEATURE (6)..(6): D-phenylalanine
XRXRXXF

SEQ ID NO: 569 - protein, 6 aa, Artificial Sequence
  Cell Penetrating Peptide (CPP) sequence
  MISC_FEATURE (2)..(2): L-3-(1-naphthyl)alanine or D-3-(1-naphthyl)alanine or L-3-(2-naphthyl)alanine or D-3-(2-naphthyl)alanine
  MISC_FEATURE (3)..(3): D-arginine
  MISC_FEATURE (5)..(5): D-arginine
FXXRXR

SEQ ID NO: 570 - protein, 6 aa, Artificial Sequence
  Cell Penetrating Peptide (CPP) sequence
  MISC_FEATURE (2)..(2): D-arginine
  MISC_FEATURE (4)..(4): D-arginine
  MISC_FEATURE (5)..(5): L-3-(1-naphthyl)alanine or D-3-(1-naphthyl)alanine or L-3-(2-naphthyl)alanine or D-3-(2-naphthyl)alanine
RXRXXF

SEQ ID NO: 571 - protein, 6 aa, Artificial Sequence
  Cell Penetrating Peptide (CPP) sequence
FWRRRR

SEQ ID NO: 572 - protein, 6 aa, Artificial Sequence
  Cell Penetrating Peptide (CPP) sequence
RRRRWF

SEQ ID NO: 573 - protein, 6 aa, Artificial Sequence
  Cell Penetrating Peptide (CPP) sequence
  MISC_FEATURE (2)..(2): L-3-(1-naphthyl)alanine or D-3-(1-naphthyl)alanine or L-3-(2-naphthyl)alanine or D-3-(2-naphthyl)alanine
YXRRRR

SEQ ID NO: 574 - protein, 6 aa, Artificial Sequence
  Cell Penetrating Peptide (CPP) sequence
  MISC_FEATURE (5)..(5): L-3-(1-naphthyl)alanine or D-3-(1-naphthyl)alanine or L-3-(2-naphthyl)alanine or D-3-(2-naphthyl)alanine
RRRRXY

SEQ ID NO: 575 - protein, 6 aa, Artificial Sequence
  Cell Penetrating Peptide (CPP) sequence
  MISC_FEATURE (1)..(1): L-phenylglycine or D-phenylglycine
  MISC_FEATURE (2)..(2): L-3-(1-naphthyl)alanine or D-3-(1-naphthyl)alanine or L-3-(2-naphthyl)alanine or D-3-(2-naphthyl)alanine
XXRRRR

SEQ ID NO: 576 - protein, 6 aa, Artificial Sequence
  Cell Penetrating Peptide (CPP) sequence
  MISC_FEATURE (5)..(5): L-3-(1-naphthyl)alanine or D-3-(1-naphthyl)alanine or L-3-(2-naphthyl)alanine or D-3-(2-naphthyl)alanine
  MISC_FEATURE (6)..(6): L-phenylglycine or D-phenylglycine
RRRRXX

SEQ ID NO: 577 - protein, 6 aa, Artificial Sequence
  Cell Penetrating Peptide (CPP) sequence
  MISC_FEATURE (2)..(2): D-arginine
  MISC_FEATURE (4)..(4): D-arginine
  MISC_FEATURE (5)..(5): L-3-(1-naphthyl)alanine or D-3-(1-naphthyl)alanine or L-3-(2-naphthyl)alanine or D-3-(2-naphthyl)alanine
RXRXXF

SEQ ID NO: 578 - protein, 9 aa, Artificial Sequence
  Cell Penetrating Peptide (CPP) sequence
  MISC_FEATURE (2)..(2): L-3-(1-naphthyl)alanine or D-3-(1-naphthyl)alanine or L-3-(2-naphthyl)alanine or D-3-(2-naphthyl)alanine
  MISC_FEATURE (4)..(4): D-arginine
  MISC_FEATURE (6)..(6): D-arginine
  MISC_FEATURE (7)..(9): any amino acid or absent
FXRXRXXXX

SEQ ID NO: 579 - protein, 9 aa, Artificial Sequence
  Cell Penetrating Peptide (CPP) sequence
  MISC_FEATURE (1)..(1): D-phenylalanine
  MISC_FEATURE (2)..(2): L-3-(1-naphthyl)alanine or D-3-(1-naphthyl)alanine or L-3-(2-naphthyl)alanine or D-3-(2-naphthyl)alanine
  MISC_FEATURE (4)..(4): D-arginine
  MISC_FEATURE (6)..(6): D-arginine
  MISC_FEATURE (7)..(9): any amino acid or absent
XXRXRXXXX

SEQ ID NO: 580 - protein, 9 aa, Artificial Sequence
  Cell Penetrating Peptide (CPP) sequence
  MISC_FEATURE (2)..(2): D-phenylalanine
  MISC_FEATURE (3)..(3): L-3-(1-naphthyl)alanine or D-3-(1-naphthyl)alanine or L-3-(2-naphthyl)alanine or D-3-(2-naphthyl)alanine
  MISC_FEATURE (5)..(5): D-arginine
  MISC_FEATURE (7)..(9): any amino acid or absent
FXXRXRXXX

SEQ ID NO: 581 - protein, 9 aa, Artificial Sequence
  Cell Penetrating Peptide (CPP) sequence
  MISC_FEATURE (2)..(2): L-3-(1-naphthyl)alanine or D-3-(1-naphthyl)alanine or L-3-(2-naphthyl)alanine or D-3-(2-naphthyl)alanine
  MISC_FEATURE (7)..(9): any amino acid or absent
FXRRRRXXX

SEQ ID NO: 582 - protein, 9 aa, Artificial Sequence
  Cell Penetrating Peptide (CPP) sequence
  MISC_FEATURE (3)..(3): L-3-(1-naphthyl)alanine or D-3-(1-naphthyl)alanine or L-3-(2-naphthyl)alanine or D-3-(2-naphthyl)alanine
  MISC_FEATURE (7)..(9): any amino acid or absent
FFXRRRXXX

SEQ ID NO: 583 - protein, 7 aa, Artificial Sequence
  Cell Penetrating Peptide (CPP) sequence
  MISC_FEATURE (2)..(2): L-3-(1-naphthyl)alanine or D-3-(1-naphthyl)alanine or L-3-(2-naphthyl)alanine or D-3-(2-naphthyl)alanine
  MISC_FEATURE (4)..(4): D-arginine
  MISC_FEATURE (6)..(6): D-arginine
FXRXRXQ

SEQ ID NO: 584 - protein, 8 aa, Artificial Sequence
  Cell Penetrating Peptide (CPP) sequence
  MISC_FEATURE (2)..(2): L-3-(1-naphthyl)alanine or D-3-(1-naphthyl)alanine or L-3-(2-naphthyl)alanine or D-3-(2-naphthyl)alanine
  MISC_FEATURE (4)..(4): D-arginine
  MISC_FEATURE (6)..(6): D-arginine
FXRXRXRQ

SEQ ID NO: 585 - protein, 8 aa, Artificial Sequence
  Cell Penetrating Peptide (CPP) sequence
  MISC_FEATURE (2)..(2): L-3-(1-naphthyl)alanine or D-3-(1-naphthyl)alanine or L-3-(2-naphthyl)alanine or D-3-(2-naphthyl)alanine
  MISC_FEATURE (4)..(4): D-arginine
  MISC_FEATURE (6)..(6): D-arginine
FXRXRXQF

SEQ ID NO: 586 - protein, 8 aa, Artificial Sequence
  Cell Penetrating Peptide (CPP) sequence
  MISC_FEATURE (2)..(2): D-phenylalanine
  MISC_FEATURE (3)..(3): L-3-(1-naphthyl)alanine or D-3-(1-naphthyl)alanine or L-3-(2-naphthyl)alanine or D-3-(2-naphthyl)alanine
  MISC_FEATURE (5)..(5): D-arginine
  MISC_FEATURE (7)..(7): D-arginine
FXXRXRXQ

SEQ ID NO: 587 - protein, 7 aa, Artificial Sequence
  Cell Penetrating Peptide (CPP) sequence
  MISC_FEATURE (1)..(1): D-phenylalanine
  MISC_FEATURE (3)..(3): L-3-(1-naphthyl)alanine or D-3-(1-naphthyl)alanine or L-3-(2-naphthyl)alanine or D-3-(2-naphthyl)alanine
  MISC_FEATURE (4)..(4): D-arginine
  MISC_FEATURE (6)..(6): D-arginine
XFXXRXR

SEQ ID NO: 588 - protein, 7 aa, Artificial Sequence
  Cell Penetrating Peptide (CPP) sequence
  MISC_FEATURE (1)..(1): L-3-(1-naphthyl)alanine or D-3-(1-naphthyl)alanine or L-3-(2-naphthyl)alanine or D-3-(2-naphthyl)alanine
  MISC_FEATURE (3)..(3): D-phenylalanine
  MISC_FEATURE (4)..(4): D-arginine
  MISC_FEATURE (6)..(6): D-arginine
XFXXRXR

SEQ ID NO: 589 - protein, 7 aa, Artificial Sequence
  Cell Penetrating Peptide (CPP) sequence
  MISC_FEATURE (1)..(1): D-phenylalanine
  MISC_FEATURE (2)..(2): L-3-(1-naphthyl)alanine or D-3-(1-naphthyl)alanine or L-3-(2-naphthyl)alanine or D-3-(2-naphthyl)alanine
  MISC_FEATURE (4)..(4): D-arginine
  MISC_FEATURE (6)..(6): D-arginine
XXRXRXQ

SEQ ID NO: 590 - protein, 6 aa, Artificial Sequence
  Cell Penetrating Peptide (CPP) sequence
  MISC_FEATURE (1)..(1): L-3-(1-naphthyl)alanine or D-3-(1-naphthyl)alanine or L-3-(2-naphthyl)alanine or D-3-(2-naphthyl)alanine
  MISC_FEATURE (2)..(2): D-phenylalanine
  MISC_FEATURE (3)..(3): D-arginine
  MISC_FEATURE (5)..(5): D-arginine
XXXRXR

SEQ ID NO: 591 - protein, 8 aa, Artificial Sequence
  Cell Penetrating Peptide (CPP) sequence
  MISC_FEATURE (1)..(1): D-phenylalanine
  MISC_FEATURE (2)..(2): L-3-(1-naphthyl)alanine or D-3-(1-naphthyl)alanine or L-3-(2-naphthyl)alanine or D-3-(2-naphthyl)alanine
  MISC_FEATURE (4)..(4): D-arginine
  MISC_FEATURE (6)..(6): D-arginine
XXRXRXRQ

SEQ ID NO: 592 - protein, 7 aa, Artificial Sequence
  Cell Penetrating Peptide (CPP) sequence
  MISC_FEATURE (1)..(1): L-3-(1-naphthyl)alanine or D-3-(1-naphthyl)alanine or L-3-(2-naphthyl)alanine or D-3-(2-naphthyl)alanine
  MISC_FEATURE (2)..(2): D-phenylalanine
  MISC_FEATURE (3)..(3): D-arginine
  MISC_FEATURE (5)..(5): D-arginine
XXXRXRR

SEQ ID NO: 593 - protein, 7 aa, Artificial Sequence
  Cell Penetrating Peptide (CPP) sequence
  MISC_FEATURE (2)..(2): L-3-(1-naphthyl)alanine or D-3-(1-naphthyl)alanine or L-3-(2-naphthyl)alanine or D-3-(2-naphthyl)alanine
  MISC_FEATURE (3)..(3): D-arginine
  MISC_FEATURE (5)..(5): D-arginine
  MISC_FEATURE (7)..(7): D-glutamine
FXXRXRX

SEQ ID NO: 594 - protein, 6 aa, Artificial Sequence
  Cell Penetrating Peptide (CPP) sequence
  MISC_FEATURE (2)..(2): D-arginine
  MISC_FEATURE (4)..(4): D-arginine
  MISC_FEATURE (6)..(6): L-3-(1-naphthyl)alanine or D-3-(1-naphthyl)alanine or L-3-(2-naphthyl)alanine or D-3-(2-naphthyl)alanine
RXRXFX

SEQ ID NO: 595 - protein, 7 aa, Artificial Sequence
  Cell Penetrating Peptide (CPP) sequence
  MISC_FEATURE (2)..(2): L-3-(1-naphthyl)alanine or D-3-(1-naphthyl)alanine or L-3-(2-naphthyl)alanine or D-3-(2-naphthyl)alanine
  MISC_FEATURE (3)..(3): D-arginine
  MISC_FEATURE (5)..(5): D-arginine
FXXRXRQ

SEQ ID NO: 596 - protein, 6 aa, Artificial Sequence
  Cell Penetrating Peptide (CPP) sequence
  MISC_FEATURE (2)..(2): D-arginine
  MISC_FEATURE (4)..(4): D-arginine
  MISC_FEATURE (6)..(6): L-3-(1-naphthyl)alanine or D-3-(1-naphthyl)alanine or L-3-(2-naphthyl)alanine or D-3-(2-naphthyl)alanine
RXRXFX

SEQ ID NO: 597 - protein, 7 aa, Artificial Sequence
  Cell Penetrating Peptide (CPP) sequence
  MISC_FEATURE (2)..(2): L-3-(1-naphthyl)alanine or D-3-(1-naphthyl)alanine or L-3-(2-naphthyl)alanine or D-3-(2-naphthyl)alanine
FXRRRRQ

SEQ ID NO: 598 - protein, 7 aa, Artificial Sequence
  Cell Penetrating Peptide (CPP) sequence
  MISC_FEATURE (6)..(6): L-3-(1-naphthyl)alanine or D-3-(1-naphthyl)alanine or L-3-(2-naphthyl)alanine or D-3-(2-naphthyl)alanine
RRRRRXF

SEQ ID NO: 599 - protein, 7 aa, Artificial Sequence
  Cell Penetrating Peptide (CPP) sequence
  MISC_FEATURE (5)..(5): L-3-(1-naphthyl)alanine or D-3-(1-naphthyl)alanine or L-3-(2-naphthyl)alanine or D-3-(2-naphthyl)alanine
RRFRXRQ

SEQ ID NO: 600 - protein, 6 aa, Artificial Sequence
  Cell Penetrating Peptide (CPP) sequence
  MISC_FEATURE (4)..(4): L-3-(1-naphthyl)alanine or D-3-(1-naphthyl)alanine or L-3-(2-naphthyl)alanine or D-3-(2-naphthyl)alanine
RRFXRR

SEQ ID NO: 601 - protein, 7 aa, Artificial Sequence
  Cell Penetrating Peptide (CPP) sequence
YFRRRRQ

SEQ ID NO: 602 - protein, 6 aa, Artificial Sequence
  Cell Penetrating Peptide (CPP) sequence
  MISC_FEATURE (6)..(6): L-3-(1-naphthyl)alanine or D-3-(1-naphthyl)alanine or L-3-(2-naphthyl)alanine or D-3-(2-naphthyl)alanine
RRRRYX

SEQ ID NO: 603 - protein, 8 aa, Artificial Sequence
  Cell Penetrating Peptide (CPP) sequence
  MISC_FEATURE (3)..(3): L-3-(1-naphthyl)alanine or D-3-(1-naphthyl)alanine or L-3-(2-naphthyl)alanine or D-3-(2-naphthyl)alanine
FFXRRRRQ

SEQ ID NO: 604 - protein, 5 aa, Artificial Sequence
  Cell Penetrating Peptide (CPP) sequence
  MISC_FEATURE (2)..(2): L-3-(1-naphthyl)alanine or D-3-(1-naphthyl)alanine or L-3-(2-naphthyl)alanine or D-3-(2-naphthyl)alanine
  MISC_FEATURE (4)..(4): D-arginine
FXRXR

SEQ ID NO: 605 - protein, 6 aa, Artificial Sequence
  Cell Penetrating Peptide (CPP) sequence
  MISC_FEATURE (1)..(1): D-phenylalanine
  MISC_FEATURE (3)..(3): L-3-(1-naphthyl)alanine or D-3-(1-naphthyl)alanine or L-3-(2-naphthyl)alanine or D-3-(2-naphthyl)alanine
  MISC_FEATURE (4)..(4): D-arginine
  MISC_FEATURE (6)..(6): D-arginine
XFXXRX

SEQ ID NO: 606 - protein, 6 aa, Artificial Sequence
  Cell Penetrating Peptide (CPP) sequence
  MISC_FEATURE (1)..(1): D-phenylalanine
  MISC_FEATURE (3)..(3): D-phenylalanine
  MISC_FEATURE (5)..(5): D-arginine
XFXRXR

SEQ ID NO: 607 - protein, 6 aa, Artificial Sequence
  Cell Penetrating Peptide (CPP) sequence
  MISC_FEATURE (2)..(2): D-phenylalanine
  MISC_FEATURE (4)..(4): D-arginine
  MISC_FEATURE (6)..(6): D-arginine
FXFXRX

SEQ ID NO: 608 - protein, 6 aa, Artificial Sequence
  Cell Penetrating Peptide (CPP) sequence
  MISC_FEATURE (1)..(1): D-phenylalanine
  MISC_FEATURE (2)..(2): L-3-(1-naphthyl)alanine or D-3-(1-naphthyl)alanine or L-3-(2-naphthyl)alanine or D-3-(2-naphthyl)alanine
  MISC_FEATURE (3)..(3): D-phenylalanine
  MISC_FEATURE (4)..(4): D-arginine
  MISC_FEATURE (6)..(6): D-arginine
XXXXRX

SEQ ID NO: 609 - protein, 6 aa, Artificial Sequence
  Cell Penetrating Peptide (CPP) sequence
  MISC_FEATURE (2)..(2): D-phenylalanine
  MISC_FEATURE (3)..(3): L-3-(1-naphthyl)alanine or D-3-(1-naphthyl)alanine or L-3-(2-naphthyl)alanine or D-3-(2-naphthyl)alanine
  MISC_FEATURE (5)..(5): D-arginine
FXXRXR

SEQ ID NO: 610 - protein, 6 aa, Artificial Sequence
  Cell Penetrating Peptide (CPP) sequence
WWWRRR

SEQ ID NO: 611 - protein, 6 aa, Artificial Sequence
  Cell Penetrating Peptide (CPP) sequence
FFFRRR

SEQ ID NO: 612 - protein, 7 aa, Artificial Sequence
  Cell Penetrating Peptide (CPP) sequence
  MISC_FEATURE (2)..(2): D-arginine
  MISC_FEATURE (4)..(4): D-arginine
  MISC_FEATURE (6)..(6): D-arginine
RXRXRXR

SEQ ID NO: 613 - protein, 7 aa, Artificial Sequence
  Cell Penetrating Peptide (CPP) sequence
  MISC_FEATURE (5)..(7): D-arginine
RRRRXXX

SEQ ID NO: 614 - protein, 8 aa, Artificial Sequence
  Cell Penetrating Peptide (CPP) sequence
  MISC_FEATURE (1)..(1): L-3-cyclohexylalanine or D-3-cyclohexylalanine
  MISC_FEATURE (2)..(2): D-arginine
  MISC_FEATURE (3)..(3): L-3-cyclohexylalanine or D-3-cyclohexylalanine
  MISC_FEATURE (5)..(5): L-3-cyclohexylalanine or D-3-cyclohexylalanine
  MISC_FEATURE (6)..(6): D-arginine
  MISC_FEATURE (7)..(7): L-3-cyclohexylalanine or D-3-cyclohexylalanine
XXXKXXXK

SEQ ID NO: 615 - protein, 8 aa, Artificial Sequence
  Cell Penetrating Peptide (CPP) sequence
  MISC_FEATURE (1)..(1): L-3-cyclohexylalanine or D-3-cyclohexylalanine
  MISC_FEATURE (2)..(2): D-arginine
  MISC_FEATURE (3)..(3): L-3-cyclohexylalanine or D-3-cyclohexylalanine
  MISC_FEATURE (6)..(6): D-arginine
  MISC_FEATURE (7)..(7): L-3-cyclohexylalanine or D-3-cyclohexylalanine
XXXKFXXK

SEQ ID NO: 616 - protein, 4 aa, Artificial Sequence
  Cell Penetrating Peptide (CPP) sequence
  MISC_FEATURE (1)..(1): L-3-cyclohexylalanine or D-3-cyclohexylalanine
  MISC_FEATURE (2)..(2): D-arginine
  MISC_FEATURE (3)..(3): L-3-cyclohexylalanine or D-3-cyclohexylalanine
XXXK

SEQ ID NO: 617 - protein, 6 aa, Artificial Sequence
  Cell Penetrating Peptide (CPP) sequence
  MISC_FEATURE (1)..(1): L-3-cyclohexylalanine or D-3-cyclohexylalanine
  MISC_FEATURE (2)..(2): D-arginine
  MISC_FEATURE (3)..(3): L-3-cyclohexylalanine or D-3-cyclohexylalanine
  MISC_FEATURE (4)..(4): D-arginine
  MISC_FEATURE (5)..(5): L-3-cyclohexylalanine or D-3-cyclohexylalanine
  MISC_FEATURE (6)..(6): D-arginine
XXXXXX

SEQ ID NO: 618 - protein, 8 aa, Artificial Sequence
  Cell Penetrating Peptide (CPP) sequence
  MISC_FEATURE (1)..(1): L-3-cyclohexylalanine or D-3-cyclohexylalanine
  MISC_FEATURE (2)..(2): D-arginine
  MISC_FEATURE (3)..(3): L-3-cyclohexylalanine or D-3-cyclohexylalanine
  MISC_FEATURE (4)..(4): D-arginine
  MISC_FEATURE (5)..(5): L-3-cyclohexylalanine or D-3-cyclohexylalanine
  MISC_FEATURE (6)..(6): D-arginine
  MISC_FEATURE (7)..(7): L-3-cyclohexylalanine or D-3-cyclohexylalanine
  MISC_FEATURE (8)..(8): D-arginine
XXXXXXXX

SEQ ID NO: 619 - protein, 8 aa, Artificial Sequence
  Cell Penetrating Peptide (CPP) sequence
  MISC_FEATURE (2)..(2): D-arginine
  MISC_FEATURE (6)..(6): D-arginine
FXFKFXFK

SEQ ID NO: 620 - protein, 8 aa, Artificial Sequence
  Cell Penetrating Peptide (CPP) sequence
  MISC_FEATURE (2)..(2): D-arginine
  MISC_FEATURE (3)..(3): L-3-cyclohexylalanine or D-3-cyclohexylalanine
  MISC_FEATURE (6)..(6): D-arginine
  MISC_FEATURE (7)..(7): L-3-cyclohexylalanine or D-3-cyclohexylalanine
FXXKFXXK

SEQ ID NO: 621 - protein, 8 aa, Artificial Sequence
  Cell Penetrating Peptide (CPP) sequence
  MISC_FEATURE (2)..(2): D-arginine
  MISC_FEATURE (6)..(6): D-arginine
FXYKFXYK

SEQ ID NO: 622 - protein, 4 aa, Artificial Sequence
  Cell Penetrating Peptide (CPP) sequence
  MISC_FEATURE (1)..(1): L-3-cyclohexylalanine or D-3-cyclohexylalanine
  MISC_FEATURE (2)..(2): D-arginine
  MISC_FEATURE (3)..(3): L-3-cyclohexylalanine or D-3-cyclohexylalanine
XXXK

SEQ ID NO: 623 - protein, 4 aa, Artificial Sequence
  Cell Penetrating Peptide (CPP) sequence
  MISC_FEATURE (2)..(2): D-arginine
FXFK

SEQ ID NO: 624 - protein, 4 aa, Artificial Sequence
  Cell Penetrating Peptide (CPP) sequence
  MISC_FEATURE (2)..(2): D-arginine
  MISC_FEATURE (3)..(3): L-3-cyclohexylalanine or D-3-cyclohexylalanine
FXXK

SEQ ID NO: 625 - protein, 5 aa, Artificial Sequence
  Cell Penetrating Peptide (CPP) sequence
  MISC_FEATURE (2)..(2): D-arginine
FXFFK

SEQ ID NO: 626 - protein, 4 aa, Artificial Sequence
  Cell Penetrating Peptide (CPP) sequence
  MISC_FEATURE (2)..(2): D-arginine
FXYK

SEQ ID NO: 627 - protein, 4 aa, Artificial Sequence
  Cell Penetrating Peptide (CPP) sequence
  MISC_FEATURE (2)..(2): D-arginine
YXYK

SEQ ID NO: 628 - protein, 7 aa, Artificial Sequence
  Cell Penetrating Peptide (CPP) sequence
  MISC_FEATURE (2)..(2): L-3-cyclohexylalanine or D-3-cyclohexylalanine
  MISC_FEATURE (4)..(4): L-3-cyclohexylalanine or D-3-cyclohexylalanine
  MISC_FEATURE (6)..(6): L-3-cyclohexylalanine or D-3-cyclohexylalanine
RXRXRXR

SEQ ID NO: 629 - protein, 7 aa, Artificial Sequence
  Cell Penetrating Peptide (CPP) sequence
  MISC_FEATURE (1)..(1): D-arginine
  MISC_FEATURE (2)..(2): L-3-cyclohexylalanine or D-3-cyclohexylalanine
  MISC_FEATURE (3)..(3): D-arginine
  MISC_FEATURE (4)..(4): L-3-cyclohexylalanine or D-3-cyclohexylalanine
  MISC_FEATURE (5)..(5): D-arginine
  MISC_FEATURE (6)..(6): L-3-cyclohexylalanine or D-3-cyclohexylalanine
  MISC_FEATURE (7)..(7): D-arginine
XXXXXXX

SEQ ID NO: 630 - protein, 4 aa, Artificial Sequence
  Cell Penetrating Peptide (CPP) sequence
  MISC_FEATURE (1)..(1): D-arginine
  MISC_FEATURE (2)..(2): 2,6-dimethyl-L-tyrosine or 2,6-dimethyl-D-tyrosine
XXKF

SEQ ID NO: 631 - protein, 8 aa, Artificial Sequence
  Cell Penetrating Peptide (CPP) sequence
  MISC_FEATURE (1)..(1): L- or D- diphenylalanine/cyclohexylalanine/3-2- or 3-1-naphthylalanine/2-aminooctanoic acid/2,6-dimethyltyrosine
  MISC_FEATURE (2)..(2): L-arginine or D-arginine
  MISC_FEATURE (3)..(3): L- or D- diphenylalanine/cyclohexylalanine/3-2- or 3-1-naphthylalanine/2-aminooctanoic acid/2,6-dimethyltyrosine
  MISC_FEATURE (4)..(4): L-arginine or D-arginine
  MISC_FEATURE (5)..(5): L- or D- diphenylalanine/cyclohexylalanine/3-2- or 3-1-naphthylalanine/2-aminooctanoic acid/2,6-dimethyltyrosine or absent
  MISC_FEATURE (6)..(6): L-arginine or D-arginine or absent
  MISC_FEATURE (7)..(7): L- or D- diphenylalanine/cyclohexylalanine/3-2- or 3-1-naphthylalanine/2-aminooctanoic acid/2,6-dimethyltyrosine or absent
  MISC_FEATURE (8)..(8): L-arginine or D-arginine or absent
XXXXXXXX

SEQ ID NO: 632 - protein, 16 aa, Artificial Sequence
  Cell Penetrating Peptide (CPP) sequence
  MISC_FEATURE (1)..(1): L- or D- diphenylalanine/cyclohexylalanine/3-2- or 3-1-naphthylalanine/2-aminooctanoic acid/2,6-dimethyltyrosine
  MISC_FEATURE (2)..(2): L-arginine or D-arginine
  MISC_FEATURE (3)..(3): L- or D- diphenylalanine/cyclohexylalanine/3-2- or 3-1-naphthylalanine/2-aminooctanoic acid/2,6-dimethyltyrosine
  MISC_FEATURE (4)..(4): L-arginine or D-arginine
  MISC_FEATURE (5)..(5): L- or D- diphenylalanine/cyclohexylalanine/3-2- or 3-1-naphthylalanine/2-aminooctanoic acid/2,6-dimethyltyrosine or absent
  MISC_FEATURE (6)..(6): L-arginine or D-arginine or absent
  MISC_FEATURE (7)..(7): L- or D- diphenylalanine/cyclohexylalanine/3-2- or 3-1-naphthylalanine/2-aminooctanoic acid/2,6-dimethyltyrosine or absent
  MISC_FEATURE (8)..(8): L-arginine or D-arginine or absent
  MISC_FEATURE (9)..(9): L- or D- diphenylalanine/cyclohexylalanine/3-2- or 3-1-naphthylalanine/2-aminooctanoic acid/2,6-dimethyltyrosine
  MISC_FEATURE (10)..(10): L-arginine or D-arginine
  MISC_FEATURE (11)..(11): L- or D- diphenylalanine/cyclohexylalanine/3-2- or 3-1-naphthylalanine/2-aminooctanoic acid/2,6-dimethyltyrosine
  MISC_FEATURE (12)..(12): L-arginine or D-arginine
  MISC_FEATURE (13)..(13): L- or D- diphenylalanine/cyclohexylalanine/3-2- or 3-1-naphthylalanine/2-aminooctanoic acid/2,6-dimethyltyrosine or absent
  MISC_FEATURE (14)..(14): L-arginine or D-arginine or absent
  MISC_FEATURE (15)..(15): L- or D- diphenylalanine/cyclohexylalanine/3-2- or 3-1-naphthylalanine/2-aminooctanoic acid/2,6-dimethyltyrosine or absent
  MISC_FEATURE (16)..(16): L-arginine or D-arginine or absent
XXXXXXXXXXXXXXXX

SEQ ID NO: 633 - protein, 8 aa, Artificial Sequence
  Cell Penetrating Peptide (CPP) sequence
  MISC_FEATURE (1)..(1): L- or D- diphenylalanine/cyclohexylalanine/3-2- or 3-1-naphthylalanine/2-aminooctanoic acid/2,6-dimethyltyrosine or absent
  MISC_FEATURE (2)..(2): L- or D- diphenylalanine/cyclohexylalanine/3-2- or 3-1-naphthylalanine/2-aminooctanoic acid/2,6-dimethyltyrosine
  MISC_FEATURE (3)..(3): L- or D- diphenylalanine/cyclohexylalanine/3-2- or 3-1-naphthylalanine/2-aminooctanoic acid/2,6-dimethyltyrosine
  MISC_FEATURE (4)..(4): L-arginine or D-arginine
  MISC_FEATURE (5)..(5): L-arginine or D-arginine
  MISC_FEATURE (6)..(6): L-arginine or D-arginine
  MISC_FEATURE (7)..(7): L-arginine or D-arginine
  MISC_FEATURE (8)..(8): L-arginine or D-arginine or absent
XXXXXXXX

SEQ ID NO: 634 - protein, 16 aa, Artificial Sequence
  Cell Penetrating Peptide (CPP) sequence
  MISC_FEATURE (1)..(1): L- or D- diphenylalanine/cyclohexylalanine/3-2- or 3-1-naphthylalanine/2-aminooctanoic acid/2,6-dimethyltyrosine or absent
  MISC_FEATURE (2)..(2): L- or D- diphenylalanine/cyclohexylalanine/3-2- or 3-1-naphthylalanine/2-aminooctanoic acid/2,6-dimethyltyrosine
  MISC_FEATURE (3)..(3): L- or D- diphenylalanine/cyclohexylalanine/3-2- or 3-1-naphthylalanine/2-aminooctanoic acid/2,6-dimethyltyrosine
  MISC_FEATURE (4)..(4): L- or D- diphenylalanine/cyclohexylalanine/3-2- or 3-1-naphthylalanine/2-aminooctanoic acid/2,6-dimethyltyrosine or absent
  MISC_FEATURE (5)..(5): L- or D- diphenylalanine/cyclohexylalanine/3-2- or 3-1-naphthylalanine/2-aminooctanoic acid/2,6-dimethyltyrosine
  MISC_FEATURE (6)..(6): L- or D- diphenylalanine/cyclohexylalanine/3-2- or 3-1-naphthylalanine/2-aminooctanoic acid/2,6-dimethyltyrosine
  MISC_FEATURE (7)..(7): L-arginine or D-arginine
  MISC_FEATURE (8)..(8): L-arginine or D-arginine
  MISC_FEATURE (9)..(9): L-arginine or D-arginine
  MISC_FEATURE (10)..(10): L-arginine or D-arginine
  MISC_FEATURE (11)..(11): L-arginine or D-arginine or absent
  MISC_FEATURE (12)..(12): L-arginine or D-arginine
  MISC_FEATURE (13)..(13): L-arginine or D-arginine
  MISC_FEATURE (14)..(14): L-arginine or D-arginine
  MISC_FEATURE (15)..(15): L-arginine or D-arginine
  MISC_FEATURE (16)..(16): L-arginine or D-arginine or absent
XXXXXXXXXXXXXXXX

SEQ ID NO: 635 - protein, 8 aa, Artificial Sequence
  Cell Penetrating Peptide (CPP) sequence
  MISC_FEATURE (1)..(1): L-phenylalanine or D-phenylalanine
  MISC_FEATURE (2)..(2): L-arginine or D-arginine
  MISC_FEATURE (3)..(3): L-phenylalanine or D-phenylalanine
  MISC_FEATURE (4)..(4): L-arginine or D-arginine
  MISC_FEATURE (5)..(5): L-phenylalanine or D-phenylalanine or absent
  MISC_FEATURE (6)..(6): L-arginine or D-arginine or absent
  MISC_FEATURE (7)..(7): L-phenylalanine or D-phenylalanine or absent
  MISC_FEATURE (8)..(8): L-arginine or D-arginine or absent
XXXXXXXX

SEQ ID NO: 636 - protein, 16 aa, Artificial Sequence
  Cell Penetrating Peptide (CPP) sequence
  MISC_FEATURE (1)..(1): L-phenylalanine or D-phenylalanine
  MISC_FEATURE (2)..(2): L-arginine or D-arginine
  MISC_FEATURE (3)..(3): L-phenylalanine or D-phenylalanine
  MISC_FEATURE (4)..(4): L-arginine or D-arginine
  MISC_FEATURE (5)..(5): L-phenylalanine or D-phenylalanine or absent
  MISC_FEATURE (6)..(6): L-arginine or D-arginine or absent
  MISC_FEATURE (7)..(7): L-phenylalanine or D-phenylalanine or absent
  MISC_FEATURE (8)..(8): L-arginine or D-arginine or absent
  MISC_FEATURE (9)..(9): L-phenylalanine or D-phenylalanine
  MISC_FEATURE (10)..(10): L-arginine or D-arginine
  MISC_FEATURE (11)..(11): L-phenylalanine or D-phenylalanine
  MISC_FEATURE (12)..(12): L-arginine or D-arginine
  MISC_FEATURE (13)..(13): L-phenylalanine or D-phenylalanine or absent
  MISC_FEATURE (14)..(14): L-phenylalanine or D-phenylalanine
  MISC_FEATURE (15)..(15): L-phenylalanine or D-phenylalanine or absent
  MISC_FEATURE (16)..(16): L-phenylalanine or D-phenylalanine
XXXXXXXXXXXXXXXX

SEQ ID NO: 637 - protein, 8 aa, Artificial Sequence
  Cell Penetrating Peptide (CPP) sequence
  MISC_FEATURE (1)..(1): L-phenylalanine or D-phenylalanine or absent
  MISC_FEATURE (2)..(2): L-phenylalanine or D-phenylalanine
  MISC_FEATURE (3)..(3): L-phenylalanine or D-phenylalanine
  MISC_FEATURE (4)..(4): L-arginine or D-arginine
  MISC_FEATURE (5)..(5): L-arginine or D-arginine
  MISC_FEATURE (6)..(6): L-arginine or D-arginine
  MISC_FEATURE (7)..(7): L-arginine or D-arginine
  MISC_FEATURE (8)..(8): L-arginine or D-arginine or absent
XXXXXXXX

SEQ ID NO: 638 - protein, 16 aa, Artificial Sequence
  Cell Penetrating Peptide (CPP) sequence
  MISC_FEATURE (1)..(1): L-phenylalanine or D-phenylalanine or absent
  MISC_FEATURE (2)..(2): L-phenylalanine or D-phenylalanine
  MISC_FEATURE (3)..(3): L-phenylalanine or D-phenylalanine
  MISC_FEATURE (4)..(4): L-phenylalanine or D-phenylalanine or absent
  MISC_FEATURE (5)..(5): L-phenylalanine or D-phenylalanine
  MISC_FEATURE (6)..(6): L-phenylalanine or D-phenylalanine
  MISC_FEATURE (7)..(7): L-arginine or D-arginine
  MISC_FEATURE (8)..(8): L-arginine or D-arginine
  MISC_FEATURE (9)..(9): L-arginine or D-arginine
  MISC_FEATURE (10)..(10): L-arginine or D-arginine
  MISC_FEATURE (11)..(11): L-arginine or D-arginine or absent
  MISC_FEATURE (12)..(12): L-arginine or D-arginine
  MISC_FEATURE (13)..(13): L-arginine or D-arginine
  MISC_FEATURE (14)..(14): L-arginine or D-arginine
  MISC_FEATURE (15)..(15): L-arginine or D-arginine
  MISC_FEATURE (16)..(16): L-arginine or D-arginine or absent
XXXXXXXXXXXXXXXX

SEQ ID NO: 639 - protein, 106 aa, Homo sapiens
MAVTALAARTWLGVWGVRTMQARGFGSDQSENVDRGAGSIREAGGAFGKREQAEEERYFRAQSREQLAALKKHHEEEIVHHKKEIERLQKEIERHKQKIKMLKHDD

SEQ ID NO: 640 - protein, 106 aa, Pan troglodytes; identical to SEQ ID NO: 639

SEQ ID NO: 641 - protein, 106 aa, Gorilla gorilla
MAVTALAARTWLGVWGVRTMQARGFGSDQSENVDRGAGSIREAGGAFGKREQAEEERYFRAQSREQLATLKKHHEEEIVHHKKEIERLQKEIERHKQKIKMLKHDD

SEQ ID NO: 642 - protein, 106 aa, Macaca mulatta
MAVTALVARTWLGVWGVRTMQARGFGSDQSENVDRGAGSIREAGGAFGKREQAEEERYFRAQSREQLAALKKHHEEEIVHHKKEIERLQKEIERHKQKIKTLKHDD

SEQ ID NO: 643 - protein, 105 aa, Odobenus rosmarus
MAVTALAARVRLGVWGVRAIQARGFSSERSDSGAGSIREAGGAFGKREQAEEERYFRARTKEQLATLKKHHEEEITHHIKEIERLQKEIERHKKKIKHLKHDDDD

SEQ ID NO: 644 - protein, 106 aa, Trichechus manatus
MAVTALAARVRLYSLGARAMQAQGFSSDQSEDLDRRAGSIREAGGAFAKREAAEEERYFRAQAKEQLAALKKYHEEEIVHSKKEIERLQKEIERHKQKIKKLKHDD

SEQ ID NO: 645 - protein, 106 aa, Ailuropoda melanoleuca
MAVTALAARVRLGVWSVRAMQARGFSSERPDYPGGSAGSIREAGGAFGKREQAEEERYFRARNKEQLEALRKHHEEEITHHKEEIERLQKEIERHKKKIKHLKHDD

SEQ ID NO: 646 - protein, 106 aa, Canis lupus
MAVSAVSSRVWLGMWGVRALQTRGFGSERSEDPGSAGSIREAGGAFGKREQAEEERYFRARTREQLAALKKHHEDEISHHIKEIERLQKEIERHKKKIKNLKSDDD

SEQ ID NO: 647 - protein, 108 aa, Felis catus
MAVTAFAARVRLGVWGVRAMQARGFSSERSEDSRAGSIREAGGAFGKREQAEEERYFRARTREQLAALKKHHEDEISHHIKEIERLQKEIERHKKKIKHLKRDEEEDD

SEQ ID NO: 648 - protein, 108 aa, Equus caballus
MAVTALAAQMRLGVWGARVMQARGFSSDRSKDHDSPAGSIREAGGAFGKREQAEEERYFRKRTREQLAALKKHHEDEISHHVKEIEHLQKEIERHKQRIKTLKDHDDD

SEQ ID NO: 649 - protein, 103 aa, Ursus maritimus
MAVTALAARVRLGVWSLRAMQARGFSSERPDSSAGSIREAGGAFGKREQAEEERYFRARNKEQLEALRKHHEEEITHHKEEIERLQKEIERHKKKIKHLKHDD

SEQ ID NO: 650 - protein, 107 aa, Rattus norvegicus
MAGSALAVRARLGVWGMRVLQTRGFGSDSSESMDSGAGSIREAGGAFGKREKAEEDRYFREKTREQLAALKKHHEDEIDHHSKEIERLQKQIERHKKKIKYLKNSEH

SEQ ID NO: 651 - protein, 107 aa, Delphinapterus leucas
MAATALAARTRFGVWSVWAMQGRGFGSESADNLGSSAGAVRDAGGAFGKREQAEEERYFRARAKEQLAALKKHHENEISHHMKEIEHLQKEIERHKQSIKKLKHDDD

SEQ ID NO: 652 - protein, 106 aa, Loxodonta africana
MATTALAARVRLCALGVRTVQAQGFSSDQPHDLDRGAGAIREAGGAFAKREAAEEERYFRAQAKEQLAALKKYHEEEITHTKKEIERLQNEIERHKQKIKKLKHDD

SEQ ID NO: 653 - protein, 107 aa, Physeter catodon
MAATALAARTRFGVWSVWAMQGRGFGSESADNLGSSAGAVRDAGGAFGKREQAEEERYFRARAKEQLAALKKHHENEISHHVKEIEHLQKEIERHKQSIKKLKHDDD

SEQ ID NO: 654 - protein, 106 aa, Oryctolagus cuniculus
MAGSALVARARLGTWGARAIQTRGFVSDKPEDIHGKAGSIREAGGAFGKREQAEEERYFRAKTKEQLAALKKHHEDEIVHHKKEIERLQKEIERHKQKIKSLNSDD

SEQ ID NO: 655 - protein, 103 aa, Cavia porcellus
MAGTALASRARLGVWGVRAMQTRGFGSDKDHDGSSGSIREAGGAFGKREQAEEERFFRQKTREQLEALKKHHEDEIYHHKKEIERMEKEIERHKQKIKQLKHD

SEQ ID NO: 656 - protein, 107 aa, Tursiops truncatus
MAATALAARTRFGVWSVWAMQGRGFGSESADNLGSSAGAVRDAGGAFGKKEQAEEERYFRARAKEQLAALKKHHENEISHHMKEIEHLQKEIERHKQSIKKLKRDDD

SEQ ID NO: 657 - protein, 107 aa, Balaenoptera acutorostrata
MAATALAARTRFGVWSVWAMQGRGFGSESADNLGSSAGAVRDAGGAFGKKEQAEEERYFRARAKEQLAALKKHHENEISHHVKEIEHLQKEIERHKQSIKKLKRDDD

SEQ ID NO: 658 - protein, 104 aa, Mustela putorius
MAVATSAARIWLGVGGFRALQARGFSSERPDSSAGSIREAGGAFGKREQAEEERYFRARTKEQLAALKKHHEEEITHHLKEIERLQKEIERHKKKIKHLKDDDD

SEQ ID NO: 659 - protein, 108 aa, Sus scrofa
MAATALAVRSRIGAWSVWAMQSRGFSSDTPEGVRSGAGAVRDAGGAFGKKEQADEERYFRARAREQLAALKKHHENEISHHVKEIERLQKEIERHKQSIKKLKNDDDD

SEQ ID NO: 660 - protein, 109 aa, Bos taurus
MAATALAARTRQAVWSVWAMQGRGFGSESGDNVRSSAGAVRDAGGAFGKREQAEEERYFRARAKEQLAALKKHHENEISHHAKEIERLQKEIERHKQSIKKLKQSEDDD

SEQ ID NO: 661 - protein, 34 aa, Artificial Sequence
  Designed; as detailed elsewhere in present application
AVRDAGGAFGKREQAEEERYFRARAKEQLAALKK

SEQ ID NO: 662 - protein, 104 aa, Heterocephalus glaber
MAGTALASRARLGVWGVRAMQTRGFSSDKDHESSSGSIRDAGGAFGKREQAEEERFFRQKTKEQLEALKKHHEDEIYHHKKAIEHMEKEIERHKQKIKQLKHDD

SEQ ID NO: 663 - protein, 106 aa, Mus musculus
MAGSALAVRARFGVWGMKVLQTRGFVSDSSDSMDTGAGSIREAGGAFGKREKAEEDRYFREKTKEQLAALRKHHEDEIDHHSKEIERLQKQIERHKKKIQQLKNNH

SEQ ID NO: 664 - protein, 108 aa, Camelus ferus
MAATALAVRTRFGVWSVWAMQGRGFSSDRPDSVRPSEGAVRDAGGAFGKREQAEEERYFRARTREQLAALKKHHENEISHHHQEIEHLQKEIERHKQAIKKLKQHDDD

SEQ ID NO: 665 - protein, 110 aa, Erinaceus europaeus
MAVSAVVAARMRLHVWGATALRARGFSSDQPSSHDSSSGSIREAGGAFGKREQAEEERYFRARTKEQLLALKKHHEDEIGHHVKEIERLQKEIERHKQRIKSLKRHDDDD

SEQ ID NO: 666 - protein, 108 aa, Mesocricetus auratus
MAGSALAIRARLGVWGVRVLQTRGFGSGSGSSESIDTSAGSIREAGGAFGKREKAEEDRYFREKTKEQLAILKKHHEDEIQHHEQEIERLQKQIERHKKKINNLKSHH

SEQ ID NO: 667 - protein, 108 aa, Myotis lucifugus
MAVPATAARLRLGAWGVRAMRAGGFGCGRSARFSTDSGAIKEAGGSFARREKAEEERYFLERTKEQLAALKKHHEEEINHHKKEIERLQKEIERHKQNIKKLKDHGDD

SEQ ID NO: 668 - protein, 117 aa, Alligator mississippiensis
MAAGVLRSGLRGAFLMQQQRGWSSGSGADQLGELGKGAGKGGGGGGSIREAGGAFGKRQAAEEERYFREKEREQLAALRKHHEEEIDHHKKQIDLLQKEIERHKYKIKKLKNDDDDD

SEQ ID NO: 669 - protein, 115 aa, Boiga irregularis
MAAVSAIFRSGLRGAMAFPQQQRAWSSGPDQLGELGKGAGKGGGGGGSIREAGGAFGKREAAAEERYFKEKEREQLANLRKHHEEEISHHKKEIERLQKEIERHKYKIKDLKDDD

SEQ ID NO: 670 - protein, 108 aa, Takifugu rubripes
MSRLLLGTNIRRCVTSQIRMFSDQLGELGKGAGKGGGGGGSLREAGGAFGRRAAAEEERYFRQREREQLEMLRNHHEEEIEHHRKEIERLQKEIDRHKGKIRKLKHDD

SEQ ID NO: 671 - protein, 109 aa, Xenopus tropicalis
MAGSSSLLRAGIRNVLLMQMRRSSDQLGELGKGAGKGGGGGGSVREAGGAFGKRQAAEEERYFRQKEQEQIASLRKHHEEEIRHHKGEIERLQKEIERHKSKIKKLNDD

SEQ ID NO: 672 - protein, 109 aa, Pygocentrus nattereri
MSICRLLKPNLRNFFATQIRMSSDQLGELGKGVGKGGGGGGAVREAGGAFGRRQAAEEEMYFKRKEHEQLAVLRKHHQEEIDHHKREIQRLQQEIIRHEGKIRKLRLDD

SEQ ID NO: 673 - protein, 113 aa, Gallus gallus
MAAVLALRGGLRGALLAQQQQRAWSSGSGLGELGKGAGKGGGGGGSIREAGGAFGKKQAAEEERYFREKEREQLAALRRHHEEEIDHHKKEIERLQKEIERHKHKIKKLKDDD

SEQ ID NO: 674 - protein, 105 aa, Danio rerio
MARLLLRRGFFSSHIRMSSDQLGELGTGAGKGGGGGGSVRAAGGSFGRREAAEEERYFRQKEREQLAALKNHHEEEIDHHKKEIERLQREIDRHKGKIRKLKHDD

SEQ ID NO: 675 - protein, 107 aa, Anguilla anguilla
MSRLLKSNLRGFLITQIRMSSDQLGELGKGAGKGGGGGGSVREAGGALGKRQAAEEERYFKRKEQEQLAALRRHHEEEIDHHKKEIERLQREIDRHKGKIRKLKHDD

SEQ ID NO: 676 - protein, 43 aa, Artificial Sequence
  Designed; as detailed elsewhere in present application
  misc_feature (1)..(35): Xaa can be any naturally occurring amino acid
  misc_feature (37)..(43): Xaa can be any naturally occurring amino acid
XXXXXXXXXXXXXXXXXXXXXXXXXXXXXXXXXXXHXXXXXXX

SEQ ID NO: 677 - protein, 106 aa, Homo sapiens; identical to SEQ ID NO: 639

SEQ ID NO: 678 - protein, 106 aa, Artificial Sequence
  Designed; as detailed elsewhere in present application
MAVTALAARTWLGVWGVRTMQARGFGSDQSENVDRGAGAIREAGGAFGKREQAEEERYFRAQSREQLAALKKHHEEEIVHHKKEIERLQKEIERHKQKIKMLKHDD

SEQ ID NO: 679 - protein, 106 aa, Artificial Sequence
  Designed; as detailed elsewhere in present application
MAVTALAARTWLGVWGVRTMQARGFGSDQSENVDRGAGSIREAGGAFGKRAQAEEERYFRAQSREQLAALKKHHEEEIVHHKKEIERLQKEIERHKQKIKMLKHDD

SEQ ID NO: 680 - protein, 106 aa, Artificial Sequence
  Designed; as detailed elsewhere in present application
MAVTALAARTWLGVWGVRTMQARGFGSDQSENVDRGAGSIREAGGAFGKREQAEEERYFRAQSREQLAALKKAHEEEIVHHKKEIERLQKEIERHKQKIKMLKHDD

SEQ ID NO: 681 - protein, 106 aa, Artificial Sequence
  Designed; as detailed elsewhere in present application
MAVTALAARTWLGVWGVRTMQARGFGSDQSENVDRGAGSIREAGGAFGKREQAEEERYFRAQSREQLAALKKHAEEEIVHHKKEIERLQKEIERHKQKIKMLKHDD

SEQ ID NO: 682 - protein, 106 aa, Artificial Sequence
  Designed; as detailed elsewhere in present application
MAVTALAARTWLGVWGVRTMQARGFGSDQSENVDRGAGSIREAGGAFGKREQAEEERYFRAQSREQLAALKKHHEEEIVAHKKEIERLQKEIERHKQKIKMLKHDD

SEQ ID NO: 683 - protein, 106 aa, Artificial Sequence
  Designed; as detailed elsewhere in present application
MAVTALAARTWLGVWGVRTMQARGFGSDQSENVDRGAGAIREAGGAFGKRAQAEEERYFRAQSREQLAALKKHHEEEIVHHKKEIERLQKEIERHKQKIKMLKHDD

SEQ ID NO: 684 - protein, 106 aa, Artificial Sequence
  Designed; as detailed elsewhere in present application
MAVTALAARTWLGVWGVRTMQARGFGSDQSENVDRGAGAIREAGGAFGKREQAEEERYFRAQSREQLAALKKAHEEEIVHHKKEIERLQKEIERHKQKIKMLKHDD

SEQ ID NO: 685 - protein, 106 aa, Artificial Sequence
  Designed; as detailed elsewhere in present application
MAVTALAARTWLGVWGVRTMQARGFGSDQSENVDRGAGAIREAGGAFGKREQAEEERYFRAQSREQLAALKKHAEEEIVHHKKEIERLQKEIERHKQKIKMLKHDD

SEQ ID NO: 686 - protein, 106 aa, Artificial Sequence
  Designed; as detailed elsewhere in present application
MAVTALAARTWLGVWGVRTMQARGFGSDQSENVDRGAGAIREAGGAFGKREQAEEERYFRAQSREQLAALKKHHEEEIVAHKKEIERLQKEIERHKQKIKMLKHDD

SEQ ID NO: 687 - protein, 106 aa, Artificial Sequence
  Designed; as detailed elsewhere in present application
MAVTALAARTWLGVWGVRTMQARGFGSDQSENVDRGAGSIREAGGAFGKRAQAEEERYFRAQSREQLAALKKAHEEEIVHHKKEIERLQKEIERHKQKIKMLKHDD

SEQ ID NO: 688 - protein, 106 aa, Artificial Sequence
  Designed; as detailed elsewhere in present application
MAVTALAARTWLGVWGVRTMQARGFGSDQSENVDRGAGSIREAGGAFGKRAQAEEERYFRAQSREQLAALKKHAEEEIVHHKKEIERLQKEIERHKQKIKMLKHDD

SEQ ID NO: 689 - protein, 106 aa, Artificial Sequence
  Designed; as detailed elsewhere in present application
MAVTALAARTWLGVWGVRTMQARGFGSDQSENVDRGAGSIREAGGAFGKRAQAEEERYFRAQSREQLAALKKHHEEEIVAHKKEIERLQKEIERHKQKIKMLKHDD

SEQ ID NO: 690 - protein, 106 aa, Artificial Sequence
  Designed; as detailed elsewhere in present application
MAVTALAARTWLGVWGVRTMQARGFGSDQSENVDRGAGSIREAGGAFGKREQAEEERYFRAQSREQLAALKKAAEEEIVHHKKEIERLQKEIERHKQKIKMLKHDD

SEQ ID NO: 691 - protein, 106 aa, Artificial Sequence
  Designed; as detailed elsewhere in present application
MAVTALAARTWLGVWGVRTMQARGFGSDQSENVDRGAGSIREAGGAFGKREQAEEERYFRAQSREQLAALKKAHEEEIVAHKKEIERLQKEIERHKQKIKMLKHDD

SEQ ID NO: 692 - protein, 106 aa, Artificial Sequence
  Designed; as detailed elsewhere in present application
MAVTALAARTWLGVWGVRTMQARGFGSDQSENVDRGAGSIREAGGAFGKREQAEEERYFRAQSREQLAALKKHAEEEIVAHKKEIERLQKEIERHKQKIKMLKHDD

SEQ ID NO: 693 - protein, 106 aa, Artificial Sequence
  Designed; as detailed elsewhere in present application
MAVTALAARTWLGVWGVRTMQARGFGSDQSENVDRGAGAIREAGGAFGKRAQAEEERYFRAQSREQLAALKKAHEEEIVHHKKEIERLQKEIERHKQKIKMLKHDD

SEQ ID NO: 694 - protein, 106 aa, Artificial Sequence
  Designed; as detailed elsewhere in present application
MAVTALAARTWLGVWGVRTMQARGFGSDQSENVDRGAGAIREAGGAFGKRAQAEEERYFRAQSREQLAALKKHAEEEIVHHKKEIERLQKEIERHKQKIKMLKHDD

SEQ ID NO: 695 - protein, 106 aa, Artificial Sequence
  Designed; as detailed elsewhere in present application
MAVTALAARTWLGVWGVRTMQARGFGSDQSENVDRGAGAIREAGGAFGKRAQAEEERYFRAQSREQLAALKKHHEEEIVAHKKEIERLQKEIERHKQKIKMLKHDD

SEQ ID NO: 696 - protein, 106 aa, Artificial Sequence
  Designed; as detailed elsewhere in present application
MAVTALAARTWLGVWGVRTMQARGFGSDQSENVDRGAGAIREAGGAFGKREQAEEERYFRAQSREQLAALKKAAEEEIVHHKKEIERLQKEIERHKQKIKMLKHDD

SEQ ID NO: 697 - protein, 106 aa, Artificial Sequence
  Designed; as detailed elsewhere in present application
MAVTALAARTWLGVWGVRTMQARGFGSDQSENVDRGAGAIREAGGAFGKREQAEEERYFRAQSREQLAALKKAHEEEIVAHKKEIERLQKEIERHKQKIKMLKHDD

SEQ ID NO: 698 - protein, 106 aa, Artificial Sequence
  Designed; as detailed elsewhere in present application
MAVTALAARTWLGVWGVRTMQARGFGSDQSENVDRGAGAIREAGGAFGKREQAEEERYFRAQSREQLAALKKHAEEEIVAHKKEIERLQKEIERHKQKIKMLKHDD

SEQ ID NO: 699 - protein, 106 aa, Artificial Sequence
  Designed; as detailed elsewhere in present application
MAVTALAARTWLGVWGVRTMQARGFGSDQSENVDRGAGSIREAGGAFGKRAQAEEERYFRAQSREQLAALKKAAEEEIVHHKKEIERLQKEIERHKQKIKMLKHDD

SEQ ID NO: 700 - protein, 106 aa, Artificial Sequence
  Designed; as detailed elsewhere in present application
MAVTALAARTWLGVWGVRTMQARGFGSDQSENVDRGAGSIREAGGAFGKREQAEEERYFRAQSREQLAALKKAAEEEIVAHKKEIERLQKEIERHKQKIKMLKHDD

SEQ ID NO: 701 - protein, 106 aa, Artificial Sequence
  Designed; as detailed elsewhere in present application
MAVTALAARTWLGVWGVRTMQARGFGSDQSENVDRGAGSIREAGGAFGKRAQAEEERYFRAQSREQLAALKKAHEEEIVAHKKEIERLQKEIERHKQKIKMLKHDD

SEQ ID NO: 702 - protein, 106 aa, Artificial Sequence
  Designed; as detailed elsewhere in present application
MAVTALAARTWLGVWGVRTMQARGFGSDQSENVDRGAGSIREAGGAFGKRAQAEEERYFRAQSREQLAALKKHAEEEIVAHKKEIERLQKEIERHKQKIKMLKHDD

SEQ ID NO: 703 - protein, 106 aa, Artificial Sequence
  Designed; as detailed elsewhere in present application
MAVTALAARTWLGVWGVRTMQARGFGSDQSENVDRGAGAIREAGGAFGKRAQAEEERYFRAQSREQLAALKKAAEEEIVHHKKEIERLQKEIERHKQKIKMLKHDD

SEQ ID NO: 704 - protein, 106 aa, Artificial Sequence
  Designed; as detailed elsewhere in present application
MAVTALAARTWLGVWGVRTMQARGFGSDQSENVDRGAGAIREAGGAFGKRAQAEEERYFRAQSREQLAALKKAHEEEIVAHKKEIERLQKEIERHKQKIKMLKHDD

SEQ ID NO: 705 - protein, 106 aa, Artificial Sequence
  Designed; as detailed elsewhere in present application
MAVTALAARTWLGVWGVRTMQARGFGSDQSENVDRGAGAIREAGGAFGKRAQAEEERYFRAQSREQLAALKKHAEEEIVAHKKEIERLQKEIERHKQKIKMLKHDD

SEQ ID NO: 706 - protein, 106 aa, Artificial Sequence
  Designed; as detailed elsewhere in present application
MAVTALAARTWLGVWGVRTMQARGFGSDQSENVDRGAGAIREAGGAFGKREQAEEERYFRAQSREQLAALKKAAEEEIVAHKKEIERLQKEIERHKQKIKMLKHDD

SEQ ID NO: 707 - protein, 106 aa, Artificial Sequence
  Designed; as detailed elsewhere in present application
MAVTALAARTWLGVWGVRTMQARGFGSDQSENVDRGAGSIREAGGAFGKRAQAEEERYFRAQSREQLAALKKAAEEEIVAHKKEIERLQKEIERHKQKIKMLKHDD

SEQ ID NO: 708 - protein, 106 aa, Artificial Sequence
  Designed; as detailed elsewhere in present application
MAVTALAARTWLGVWGVRTMQARGFGSDQSENVDRGAGAIREAGGAFGKRAQAEEERYFRAQSREQLAALKKAAEEEIVAHKKEIERLQKEIERHKQKIKMLKHDD

SEQ ID NO: 709 - protein, 106 aa, Artificial Sequence
  Designed; as detailed elsewhere in present application
MAVTALAARTWLGVWGVRTMQARGFGSDQSENVDRGAGSIREAGGAFGKREQAEEERYFRAQSREQLAALKKHKEEEIVHHKKEIERLQKEIERHKQKIKMLKHDD

SEQ ID NO: 710 - protein, 106 aa, Artificial Sequence; identical to SEQ ID NO: 709
  Designed; as detailed elsewhere in present application

SEQ ID NO: 711 - protein, 106 aa, Artificial Sequence; identical to SEQ ID NO: 709
  Designed; as detailed elsewhere in present application

SEQ ID NO: 712 - protein, 106 aa, Artificial Sequence; identical to SEQ ID NO: 709
  Designed; as detailed elsewhere in present application

SEQ ID NO: 713 - protein, 106 aa, Artificial Sequence; identical to SEQ ID NO: 709
  Designed; as detailed elsewhere in present application

SEQ ID NO: 714 - protein, 106 aa, Artificial Sequence
  Designed; as detailed elsewhere in present application
MAVTALAARTWLGVWGVRTMQARGFGSDQSDNVDRGAGSIREAGGAFGKREQAEEERYFRAQSREQLAALKKHKEEEIVHHKKEIERLQKEIERHKQKIKMLKHDD

SEQ ID NO: 715 - protein, 106 aa, Artificial Sequence
  Designed; as detailed elsewhere in present application
MAVTALAARTWLGVWGVRTMQARGFGSDQSENVDRGAGSIREAGGAFGKREQAEEERYFRAQSREQLATLKKHKEEEIVHHKKEIERLQKEIERHKQKIKMLKHDD

SEQ ID NO: 716 - protein, 106 aa, Artificial Sequence
  Designed; as detailed elsewhere in present application
MAVTALVARTWLGVWGVRTMQARGFGSDQSENVDRGAGSIREAGGAFGKREQAEEERYFRAQSREQLAALKKHKEEEIVHHKKEIERLQKEIERHKQKIKTLKHDD

SEQ ID NO: 717 - protein, 106 aa, Artificial Sequence; identical to SEQ ID NO: 716
  Designed; as detailed elsewhere in present application

SEQ ID NO: 718 - protein, 106 aa, Artificial Sequence; identical to SEQ ID NO: 716
  Designed; as detailed elsewhere in present application

SEQ ID NO: 719 - protein, 106 aa, Artificial Sequence; identical to SEQ ID NO: 716
  Designed; as detailed elsewhere in present application

SEQ ID NO: 720 - protein, 106 aa, Artificial Sequence; identical to SEQ ID NO: 716
  Designed; as detailed elsewhere in present application

SEQ ID NO: 721 - protein, 106 aa, Artificial Sequence; identical to SEQ ID NO: 716
  Designed; as detailed elsewhere in present application

SEQ ID NO: 722 - protein, 106 aa, Artificial Sequence
  Designed; as detailed elsewhere in present application
MAVTALVARTWLGVWGVRTMQARGFGSDQSENVDRGAGSIREAGGAFGKREQAEEERYFRAQNREQLAALKKHKEEEIVHHKKEIERLQKEIERHKQKIKTLKHDD

SEQ ID NO: 723 - protein, 106 aa, Artificial Sequence
  Designed; as detailed elsewhere in present application
MAVTALVARTWLGVWGVRTMQARGFGSDQSENIDRGAGSIREAGGAFGKREQAEEERYFRTQSREQLAALKKHKEEEIVHHKKEIERLQKEIERHKQKIKTLKHDD

SEQ ID NO: 724 - protein, 106 aa, Artificial Sequence; identical to SEQ ID NO: 723
  Designed; as detailed elsewhere in present application

SEQ ID NO: 725 - protein, 106 aa, Artificial Sequence
  Designed; as detailed elsewhere in present application
MAVTALAARTWLGVWGVRTMQARSFGSDQSENLDRGAGSIREAGGAFGKREQAEEERYFRAQTREQLAALKKHKEEEIVHHKKEIERLQKEIERHKQKIKILKHDD

SEQ ID NO: 726 - protein, 106 aa, Artificial Sequence
  Designed; as detailed elsewhere in present application
MAVTALAARTWLGVWGVRTMQARSFGSDQSENLDRGAGSIREAGGAFGKREQAEEERYFRAQTREQLAALKKHKEDEIVHHKKEIERLQKEIERHKQKIKILKHDD

SEQ ID NO: 727 - protein, 106 aa, Artificial Sequence
  Designed; as detailed elsewhere in present application
MAVTALVARTWLGVWGVRTIQARGFGSDQSENVDRGAGAIREAGGAFGKREQAEEERYFRTQSREQLAALKKHKEEEIVHHKKEIERLQKEIERHKQKIKTLKHDD

SEQ ID NO: 728 - protein, 106 aa, Artificial Sequence
  Designed; as detailed elsewhere in present application
MAVTALAARTWLGVWGVRTMQARSFGSDQSENLDRGAGSIREAGGAFGKREQAEEERYFRAQTREQLAALKKHKEEEIVHHKKEIERLQKEIERHKQKIKILKNDD

SEQ ID NO: 729 - protein, 106 aa, Artificial Sequence
  Designed; as detailed elsewhere in present application
MAVTALAARTWLGVWGVRTMQARSFGSDQSENLDRGAGSIREAGGAFGKREQAEEERYFRAQAREQLAALKKHKEDEIVHHKKEIERLQKEIERHKQKIKILKDDD

SEQ ID NO: 730 - protein, 106 aa, Artificial Sequence
  Designed; as detailed elsewhere in present application
MAVTALVARTWLGVWGVRTMQARGFGSDQSENVDRDAGSIREAGGAFGKREQAEEERYFRAQSREQLAALKKHKEEEIVHHKKEIERLQKEIEQHKQKIKTLKRDD

SEQ ID NO: 731 - protein, 120 aa, Artificial Sequence
  Designed; as detailed elsewhere in present application
MAVTALVARTWLGVWGVRTMQARGFGSDQSENVDRGAGSIREAGGAFGKREQAEEERYFRIITMTPAIPYREPRAQSREQLAALKKHKEEEIVHHKKEIERLQKEIERHKQKIKTLKHDD

SEQ ID NO: 732 - protein, 106 aa, Artificial Sequence
  Designed; as detailed elsewhere in present application
MAVSALVARTWLGMWGVRARQTRGFGSDQSENVDRSSGSIREAGGAFGKREQAEEERYFRAQTREQLAALKKHKEDEIGHHKKEIERLQKEIERHKQKIKTLKHDD

SEQ ID NO: 733 - protein, 136 aa, Artificial Sequence
  Designed; as detailed elsewhere in present application
MAVTALVARTWLGVWGVRTMQARGFGSDQVRCGSVRCSSPEGGSHLRFPTFICVPVSLQSENIDRGAGSIREAGGAFGKREQAEEERYFRTQSREQLAALKKHKEEEIVHHKKEIERLQKEIERHKQKIKTLKHDD

SEQ ID NO: 734 - protein, 136 aa, Artificial Sequence
  Designed; as detailed elsewhere in present application
MAVTALAARTWLGVWGVRTMQARSFGSDQVRCDSVRRPSREGGSHLRFLIFTSVPVSLQSENLDRGAGSIREAGGAFGKREQAEEERYFRAQTREQLAALKKHKEDEIVHHKKEIERLQKEIERHKQKIKILKHDD

SEQ ID NO: 735 - protein, 106 aa, Artificial Sequence
  Designed; as detailed elsewhere in present application
MAVSVLAVRSRLGMWGVKAVQARGFGSDQSEHTDRSAGSIREAGGAFGKREQAEEDRYFRAQAKEQLAALKKHKEDEIGHHKKEIERLQKEIERHKQKIKILKQDD

SEQ ID NO: 736 - protein, 106 aa, Artificial Sequence
  Designed; as detailed elsewhere in present application
MAVSAQVVRSRFGMWGVKAVQARGFASDQPSNVDRSAGSIREAGGAFGKKEQAEEERYFRAQAKEQLAALKKHKEDEIGHHKREIERLQKEIERHKQKIKKLNHDD

SEQ ID NO: 737 - protein, 105 aa, Artificial Sequence
  Designed; as detailed elsewhere in present application
MAVTALAARVRLGVWGVRALEARGFSSERSDSGAGSIREAGGAFGKREQAEEERYFRARTKEQLAALKKHKEEEITHHIKEIERLQKEIERHKKKIKHLKHDDDD

SEQ ID NO: 738 - protein, 98 aa, Artificial Sequence
  Designed; as detailed elsewhere in present application
FAVTALVVRTWLGVWGVRTMQFQNVHPGAGSIREAGGAFGKREQAEEERYFRTQSREQLAALKKHKEEEIVHHKKEIERLQKEIERHKQKIKTLTHDD

SEQ ID NO: 739 - protein, 105 aa, Artificial Sequence
  Designed; as detailed elsewhere in present application
MAVTALAARVRLGVWGVRAIQARGFSSERSDSGAGSIREAGGAFGKREQAEEERYFRARTKEQLATLKKHKEEEITHHIKEIERLQKEIERHKKKIKHLKHDDDD

SEQ ID NO: 740 - protein, 106 aa, Artificial Sequence
  Designed; as detailed elsewhere in present application
MAASALAVRARLGVWGVRAAQARGFSSSQPDDLDRGAGSIREAGGAFGKREQAEEERYFRAQTKQQLAALRKHKEEEIAHHQKEIERLQKAIQRHKEKIKVLKQDD

SEQ ID NO: 741 - protein, 108 aa, Artificial Sequence
  Designed; as detailed elsewhere in present application
MAVTALAARLRLGVWGVRATQAQSFSSGRSGNVDSGAGSIREAGGAFGKREQAEEERYFRARTKEQLAALKKHKEDEIGHHRKEIERLQKEIERHKQTIKKLKEHDDD

SEQ ID NO: 742 - protein, 106 aa, Artificial Sequence
  Designed; as detailed elsewhere in present application
MAVTALAARVRLYSLGARAMQAQGFSSDQSEDLDRRAGSIREAGGAFAKREAAEEERYFRAQAKEQLAALKKYKEEEIVHSKKEIERLQKEIERHKQKIKKLKHDD

SEQ ID NO: 743 - protein, 106 aa, Artificial Sequence
  Designed; as detailed elsewhere in present application
MAVTALAARVRLGVWSVRAMQARGFSSERPDYPGGSAGSIREAGGAFGKREQAEEERYFRARNKEQLEALRKHKEEEITHHKEEIERLQKEIERHKKKIKHLKHDD

SEQ ID NO: 744 - protein, 106 aa, Artificial Sequence
  Designed; as detailed elsewhere in present application
MAVSAVSSRVWLGMWGVRALQTRGFGSERSEDPGSAGSIREAGGAFGKREQAEEERYFRARTREQLAALKKHKEDEISHHIKEIERLQKEIERHKKKIKNLKSDDD

SEQ ID NO: 745 - protein, 108 aa, Artificial Sequence
  Designed; as detailed elsewhere in present application
MAVTAFAARVRLGVWGVRAMQARGFSSERSEDSRAGSIREAGGAFGKREQAEEERYFRARTREQLAALKKHKEDEISHHIKEIERLQKEIERHKKKIKHLKRDEEEDD

SEQ ID NO: 746 - protein, 108 aa, Artificial Sequence
  Designed; as detailed elsewhere in present application
MAVTALAAQMRLGVWGARVMQARGFSSDRSKDHDSPAGSIREAGGAFGKREQAEEERYFRKRTREQLAALKKHKEDEISHHVKEIEHLQKEIERHKQRIKTLKDHDDD

SEQ ID NO: 747 - protein, 106 aa, Artificial Sequence
  Designed; as detailed elsewhere in present application
MAVSALVLRSWFGRWGVKAMQARGFTRDQPNYFDAGEGSIREAGGAFGKRERAEEERYFRAQAREQLARLKKHKEDEVGHHKREIERLQKEIERHQQKIKVLSHDH

SEQ ID NO: 748 - protein, 103 aa, Artificial Sequence
  Designed; as detailed elsewhere in present application
MAVTALAARVRLGVWSLRAMQARGFSSERPDSSAGSIREAGGAFGKREQAEEERYFRARNKEQLEALRKHKEEEITHHKEEIERLQKEIERHKKKIKHLKHDD

SEQ ID NO: 749 - protein, 103 aa, Artificial Sequence
  Designed; as detailed elsewhere in present application
MAVTALAARVRLGVWSVRAMQARGFSSERVRRRAGSIREAGGAFGKREQAEEERYFRARNKEQLEALRKHKEEEITHHKEEIERLQKEIERHKKKIKHLKHND

SEQ ID NO: 750 - protein, 106 aa, Artificial Sequence
  Designed; as detailed elsewhere in present application
MAGTALAARARLGVLGMRAMQTRGFGSDQSEDGGRSAGAIREAGGAFGKRERAEEERYFREKTREQLAILKKHKEDEISHHKKEIERLQKEIERHKQKIKHLHNDD

SEQ ID NO: 751 - protein, 105 aa, Artificial Sequence
  Designed; as detailed elsewhere in present application
MAVTALAARVRLGVRGVRALEARGFSSERSDSGAGSIREAGGAFGKREQAEEERYFRARTKEQLAALKKHKEEEITHHIKEIEHLQKEIERHKKKIKHLKHDDDD

SEQ ID NO: 752 - protein, 107 aa, Artificial Sequence
  Designed; as detailed elsewhere in present application
MAGSALAVRARLGVWGMRVLQTRGFGSDSSESMDSGAGSIREAGGAFGKREKAEEDRYFREKTREQLAALKKHKEDEIDHHSKEIERLQKQIERHKKKIKYLKNSEH

SEQ ID NO: 753 - protein, 107 aa, Artificial Sequence
  Designed; as detailed elsewhere in present application
MAATALAARTRFGVWSVWAMQGRGFGSESADNLGSSAGAVRDAGGAFGKREQAEEERYFRARAKEQLAALKKHKENEISHHMKEIEHLQKEIERHKQSIKKLKHDDD

SEQ ID NO: 754 - protein, 107 aa, Artificial Sequence; identical to SEQ ID NO: 753
  Designed; as detailed elsewhere in present application

SEQ ID NO: 755 - protein, 106 aa, Artificial Sequence
  Designed; as detailed elsewhere in present application
MATTALAARVRLCALGVRTVQAQGFSSDQPHDLDRGAGAIREAGGAFAKREAAEEERYFRAQAKEQLAALKKYKEEEITHTKKEIERLQNEIERHKQKIKKLKHDD

SEQ ID NO: 756 - protein, 107 aa, Artificial Sequence
  Designed; as detailed elsewhere in present application
MAATALAARTRFGVWSVWAMQGRGFGSESADNLGSSAGAVRDAGGAFGKREQAEEERYFRARAKEQLAALKKHKENEISHHVKEIEHLQKEIERHKQSIKKLKHDDD

SEQ ID NO: 757 - protein, 106 aa, Artificial Sequence
  Designed; as detailed elsewhere in present application
MAGSALVARARLGTWGARAIQTRGFVSDKPEDIHGKAGSIREAGGAFGKREQAEEERYFRAKTKEQLAALKKHKEDEIVHHKKEIERLQKEIERHKQKIKSLNSDD

SEQ ID NO: 758 - protein, 103 aa, Artificial Sequence
  Designed; as detailed elsewhere in present application
MAGTALASRARLGVWGVRAMQTRGFGSDKDHDGSSGSIREAGGAFGKREQAEEERFFRQKTREQLEALKKHKEDEIYHHKKEIERMEKEIERHKQKIKQLKHD

SEQ ID NO: 759 - protein, 107 aa, Artificial Sequence
  Designed; as detailed elsewhere in present application
MAATALAARTRFGVWSVWAMQGRGFGSESADNLGSSAGAVRDAGGAFGKREQAEEERYFRARAKEQLTALKKHKENEISHHMKEIEHLQKEIERHKQSIKKLKHDDD

SEQ ID NO: 760 - protein, 105 aa, Artificial Sequence
  Designed; as detailed elsewhere in present application
MAVTALAARVRLGVRGVRALEARGFSSERSDSGAGSIREAGGAFAKREQAEEERYFRARTKEQLAALKKHKEEEITHHIKEIEHLQKEIERHKKKIKHLKHDDDD

SEQ ID NO: 761 - protein, 106 aa, Artificial Sequence
  Designed; as detailed elsewhere in present application
MAGSALAIRARLGVWGMRVLQTRGYGSDSSESMDSGAGSIREAGGAFGKREKAEEDRYFREKTKEQLAALRKHKEDEIEHHQQEIERLQKQIERHKKKIKHLKHNH

SEQ ID NO: 762 - protein, 104 aa, Artificial Sequence
  Designed; as detailed elsewhere in present application
MAVATSAARIWLGVGGFRAVQARGFSSDRSDSSAGSIREAGGAFGKREQAEEERYFRARTKEQLAALKKHKEEEITHHVKEIERLQKEIERHKKKIKHLKDDDD

SEQ ID NO: 763 - protein, 107 aa, Artificial Sequence
  Designed; as detailed elsewhere in present application
MAATALAARTRFGVWSVWAMQGRGFGSESADNLGSSAGAVRDAGGAFGKKEQAEEERYFRARAKEQLAALKKHKENEISHHMKEIEHLQKEIERHKQSIKKLKRDDD

SEQ ID NO: 764 - protein, 107 aa, Artificial Sequence
  Designed; as detailed elsewhere in present application
MAATALAARTRFGVWSVWAMQGRGFGSESADNLGSSAGAVRDAGGAFGKKEQAEEERYFRARAKEQLAALKKHKENEISHHVKEIEHLQKEIERHKQSIKKLKRDDD

SEQ ID NO: 765 - protein, 104 aa, Artificial Sequence
  Designed; as detailed elsewhere in present application
MAVATSAARIWLGVGGFRALQARGFSSERPDSSAGSIREAGGAFGKREQAEEERYFRARTKEQLAALKKHKEEEITHHLKEIERLQKEIERHKKKIKHLKDDDD

SEQ ID NO: 766 - protein, 108 aa, Artificial Sequence
  Designed; as detailed elsewhere in present application
MAATALAVRSRIGAWSVWAMQSRGFSSDTPEGVRSGAGAVRDAGGAFGKKEQADEERYFRARAREQLAALKKHKENEISHHVKEIERLQKEIERHKQSIKKLKNDDDD

SEQ ID NO: 767 - protein, 109 aa, Artificial Sequence
  Designed; as detailed elsewhere in present application
MAATALAARTRQAVWSVLSMQGRGFGSESGDNVRSSAGAVRDAGGAFGKREQAEEERYFRARAKEQLAALKKHKENEISHHAKEIERLQKEIERHKQSIKKLKQSEDDD

SEQ ID NO: 768 - protein, 109 aa, Artificial Sequence
  Designed; as detailed elsewhere in present application
MAATALAARTRQAVWSVWAMQGRGFGSESGDNVRSSAGAVRDAGGAFGKREQAEEERYFRARAKEQLAALKKHKENEISHHAKEIERLQKEIERHKQSIKKLKQSEDDD

SEQ ID NO: 769 - protein, 106 aa, Artificial Sequence
  Designed; as detailed elsewhere in present application
MAGTALVARARLGVWSVRAMQTRSFGSDQADNIDRSAGSIREAGGAFGKRSKAEEDRYFREKTKEQLLALKKHKEDEIDVHEEEIKRLQKQIERHKQKIKNLKYID

SEQ ID NO: 770 - protein, 104 aa, Artificial Sequence
  Designed; as detailed elsewhere in present application
MAGTALASRARLGVWGVRAMQTRGFSSDKDHESSSGSIRDAGGAFGKREQAEEERFFRQKTKEQLEALKKHKEDEIYHHKKAIEHMEKEIERHKQKIKQLKHDD

SEQ ID NO: 771 - protein, 106 aa, Artificial Sequence
  Designed; as detailed elsewhere in present application
MAGSALAVRARFGVWGMKVLQTRGFVSDSSDSMDTGAGSIREAGGAFGKREKAEEDRYFREKTKEQLAALRKHKEDEIDHHSKEIERLQKQIERHKKKIQQLKNNH

SEQ ID NO: 772 - protein, 106 aa, Artificial Sequence
  Designed; as detailed elsewhere in present application
MAGSALATRARLGAWGVRVLQTRGFGSDSSGSTESGAGAIREAGGAFGKREKSEEDRYFREKTKEQLAALKKHKEDEIQYHEQEIERLQKQIERHKKKMKNLKNND

SEQ ID NO: 773 - protein, 108 aa, Artificial Sequence
  Designed; as detailed elsewhere in present application
MAATALAVRTRFGVWSVWAMQGRGFSSDRPDSVRPSEGAVRDAGGAFGKREQAEEERYFRARTREQLAALKKHKENEISHHHQEIEHLQKEIERHKQAIKKLKQHDDD

SEQ ID NO: 774 - protein, 110 aa, Artificial Sequence
  Designed; as detailed elsewhere in present application
MAVSAVVAARMRLHVWGATALRARGFSSDQPSSHDSSSGSIREAGGAFGKREQAEEERYFRARTKEQLLALKKHKEDEIGHHVKEIERLQKEIERHKQRIKSLKRHDDDD

SEQ ID NO: 775 - protein, 108 aa, Artificial Sequence
  Designed; as detailed elsewhere in present application
MAGSALAIRARLGVWGVRVLQTRGFGSGSGSSESIDTSAGSIREAGGAFGKREKAEEDRYFREKTKEQLAILKKHKEDEIQHHEQEIERLQKQIERHKKKINNLKSHH

SEQ ID NO: 776 - protein, 104 aa, Artificial Sequence
  Designed; as detailed elsewhere in present application
MAGTALASRARLGVRGVRAMQTRGFSSDKDHESSAGSIRDAGGAFGKREQAEEERFFRQKTKEQLDALKKHKEDEIYHHKKAIEQMEKEIERHKQKIKQLKHHE

SEQ ID NO: 777 - protein, 103 aa, Artificial Sequence
  Designed; as detailed elsewhere in present application
MAGSALVARARLGTWDTRAEGHKPDKPEDIHGKAGSIREAGGAFGKREQAEEERYFRAKTKEQLADLKKHKEDEIVHHKKEIERLQKEIERHKQKIKSLNSDD

SEQ ID NO: 778 - protein, 106 aa, Artificial Sequence
  Designed; as detailed elsewhere in present application
MAVSESAVRLWLTVCGVRAMQAGGFGCERSANFSFEAGANREAGGTFTKKEKAEEERYFRERTKEQLAALKKQHEEEITHKKKEIEHLQKEIDRHKQNIKKLKDHD

SEQ ID NO: 779 - protein, 110 aa, Artificial Sequence
  Designed; as detailed elsewhere in present application
MACTVATAARLGLGLWGARTMQARSYNLDSRQFSTLGGEGGGSIRDAGGAFSRREKAEEERYFREKNKEQLAALRKYKQEEISHHEKEIQRLQKEIERHKGKIKHLKHDD

SEQ ID NO: 780 - protein, 96 aa, Artificial Sequence
  Designed; as detailed elsewhere in present application
VWSVWAMQGRGFGSESADSSSPSRPRLYQCPRLSPQREQAEEERYFRARAKEQLAALKKHKENEISHHAKEIERLQKEIERHKQSIKRLKQSEDDD

SEQ ID NO: 781 - protein, 43 aa, Artificial Sequence
  Designed; as detailed elsewhere in present application
  misc_feature (2)..(35): Xaa can be any naturally occurring amino acid
  MISC_FEATURE (36)..(36): Xaa at this position is a single (one, 1) amino acid selected from the following options: Lys Arg Ala
  misc_feature (37)..(43): Xaa can be any naturally occurring amino acid
AXXXXXXXXXXXXXXXXXXXXXXXXXXXXXXXXXXKXXXXXXX

SEQ ID NO: 782 - protein, 106 aa, Artificial Sequence
  Designed; as detailed elsewhere in present application
MAVTALAARTWLGVWGVRTMQARGFGSDQSENVDRGAGAIREAGGAFGKREQAEEERYFRAQSREQLAALKKHKEEEIVHHKKEIERLQKEIERHKQKIKMLKHDD

SEQ ID NO: 783 - protein, 109 aa, Artificial Sequence; identical to SEQ ID NO: 768
  Designed; as detailed elsewhere in present application

SEQ ID NO: 784 - protein, 106 aa, Artificial Sequence
  Designed; as detailed elsewhere in present application
MAGSALAVRARFGVWGMKVLQTRGFVSDSSDSMDTGAGAIREAGGAFGKREKAEEDRYFREKTKEQLAALRKHKEDEIDHHSKEIERLQKQIERHKKKIQQLKNNH

SEQ ID NO: 785 - protein, 107 aa, Artificial Sequence
  Designed; as detailed elsewhere in present application
MAGSALAVRARLGVWGMRVLQTRGFGSDSSESMDSGAGAIREAGGAFGKREKAEEDRYFREKTREQLAALKKHKEDEIDHHSKEIERLQKQIERHKKKIKYLKNSEH

SEQ ID NO: 786 - protein, 106 aa, Artificial Sequence
  Designed; as detailed elsewhere in present application
MAGSALVARARLGTWGARAIQTRGFVSDKPEDIHGKAGAIREAGGAFGKREQAEEERYFRAKTKEQLAALKKHKEDEIVHHKKEIERLQKEIERHKQKIKSLNSDD

SEQ ID NO: 787 - protein, 103 aa, Artificial Sequence
  Designed; as detailed elsewhere in present application
MAGTALASRARLGVWGVRAMQTRGFGSDKDHDGSSGAIREAGGAFGKREQAEEERFFRQKTREQLEALKKHKEDEIYHHKKEIERMEKEIERHKQKIKQLKHD

SEQ ID NO: 788 - protein, 106 aa, Artificial Sequence
  Designed; as detailed elsewhere in present application
MAVSAVSSRVWLGMWGVRALQTRGFGSERSEDPGSAGAIREAGGAFGKREQAEEERYFRARTREQLAALKKHKEDEISHHIKEIERLQKEIERHKKKIKNLKSDDD

SEQ ID NO: 789 - protein, 108 aa, Artificial Sequence
  Designed; as detailed elsewhere in present application
MAVTAFAARVRLGVWGVRAMQARGFSSERSEDSRAGAIREAGGAFGKREQAEEERYFRARTREQLAALKKHKEDEISHHIKEIERLQKEIERHKKKIKHLKRDEEEDD

SEQ ID NO: 790 - protein, 108 aa, Artificial Sequence
  Designed; as detailed elsewhere in present application
MAVTALAAQMRLGVWGARVMQARGFSSDRSKDHDSPAGAIREAGGAFGKREQAEEERYFRKRTREQLAALKKHKEDEISHHVKEIEHLQKEIERHKQRIKTLKDHDDD

SEQ ID NO: 791 - protein, 104 aa, Artificial Sequence
  Designed; as detailed elsewhere in present application
MAGTALASRARLGVWGVRAMQTRGFSSDKDHESSSGAIRDAGGAFGKREQAEEERFFRQKTKEQLEALKKHKEDEIYHHKKAIEHMEKEIERHKQKIKQLKHDD

SEQ ID NO: 792 - protein, 106 aa, Artificial Sequence; identical to SEQ ID NO: 772
  Designed; as detailed elsewhere in present application

SEQ ID NO: 793 - protein, 108 aa, Artificial Sequence
  Designed; as detailed elsewhere in present application
MAGSALAIRARLGVWGVRVLQTRGFGSGSGSSESIDTSAGAIREAGGAFGKREKAEEDRYFREKTKEQLAILKKHKEDEIQHHEQEIERLQKQIERHKKKINNLKSHH

SEQ ID NO: 794 - protein, 104 aa, Artificial Sequence
  Designed; as detailed elsewhere in present application
MAVATSAARIWLGVGGFRALQARGFSSERPDSSAGAIREAGGAFGKREQAEEERYFRARTKEQLAALKKHKEEEITHHLKEIERLQKEIERHKKKIKHLKDDDD

SEQ ID NO: 795 - protein, 107 aa, Artificial Sequence; identical to SEQ ID NO: 753
  Designed; as detailed elsewhere in present application

SEQ ID NO: 796 - protein, 106 aa, Artificial Sequence; identical to SEQ ID NO: 755
  Designed; as detailed elsewhere in present application

SEQ ID NO: 797 - protein, 107 aa, Artificial Sequence; identical to SEQ ID NO: 756
  Designed; as detailed elsewhere in present application

SEQ ID NO: 798 - protein, 106 aa, Artificial Sequence; identical to SEQ ID NO: 782
  Designed; as detailed elsewhere in present application

SEQ ID NO: 799 - protein, 106 aa, Artificial Sequence; identical to SEQ ID NO: 782
  Designed; as detailed elsewhere in present application

SEQ ID NO: 800 - protein, 106 aa, Artificial Sequence; identical to SEQ ID NO: 782
  Designed; as detailed elsewhere in present application

SEQ ID NO: 801 - protein, 106 aa, Artificial Sequence; identical to SEQ ID NO: 782
  Designed; as detailed elsewhere in present application

SEQ ID NO: 802 - protein, 106 aa, Artificial Sequence
  Designed; as detailed elsewhere in present application
MAVTALAARTWLGVWGVRTMQARGFGSDQSDNVDRGAGAIREAGGAFGKREQAEEERYFRAQSREQLAALKKHKEEEIVHHKKEIERLQKEIERHKQKIKMLKHDD

SEQ ID NO: 803 - protein, 106 aa, Artificial Sequence
  Designed; as detailed elsewhere in present application
MAVTALAARTWLGVWGVRTMQARGFGSDQSENVDRGAGAIREAGGAFGKREQAEEERYFRAQSREQLATLKKHKEEEIVHHKKEIERLQKEIERHKQKIKMLKHDD

SEQ ID NO: 804 - protein, 106 aa, Artificial Sequence
  Designed; as detailed elsewhere in present application
MAVTALVARTWLGVWGVRTMQARGFGSDQSENVDRGAGAIREAGGAFGKREQAEEERYFRAQSREQLAALKKHKEEEIVHHKKEIERLQKEIERHKQKIKTLKHDD

SEQ ID NO: 805 - protein, 106 aa, Artificial Sequence; identical to SEQ ID NO: 804
  Designed; as detailed elsewhere in present application

SEQ ID NO: 806 - protein, 106 aa, Artificial Sequence; identical to SEQ ID NO: 804
  Designed; as detailed elsewhere in present application

SEQ ID NO: 807 - protein, 106 aa, Artificial Sequence; identical to SEQ ID NO: 804
  Designed; as detailed elsewhere in present application

SEQ ID NO: 808 - protein, 106 aa, Artificial Sequence; identical to SEQ ID NO: 804
  Designed; as detailed elsewhere in present application

SEQ ID NO: 809 - protein, 106 aa, Artificial Sequence; identical to SEQ ID NO: 804
  Designed; as detailed elsewhere in present application

SEQ ID NO: 810 - protein, 106 aa, Artificial Sequence
  Designed; as detailed elsewhere in present application
MAVTALVARTWLGVWGVRTMQARGFGSDQSENVDRGAGAIREAGGAFGKREQAEEERYFRAQNREQLAALKKHKEEEIVHHKKEIERLQKEIERHKQKIKTLKHDD

SEQ ID NO: 811 - protein, 106 aa, Artificial Sequence
  Designed; as detailed elsewhere in present application
MAVTALVARTWLGVWGVRTMQARGFGSDQSENIDRGAGAIREAGGAFGKREQAEEERYFRTQSREQLAALKKHKEEEIVHHKKEIERLQKEIERHKQKIKTLKHDD

SEQ ID NO: 812 - protein, 106 aa, Artificial Sequence; identical to SEQ ID NO: 811
  Designed; as detailed elsewhere in present application

SEQ ID NO: 813 - protein, 106 aa, Artificial Sequence
  Designed; as detailed elsewhere in present application
MAVTALAARTWLGVWGVRTMQARSFGSDQSENLDRGAGAIREAGGAFGKREQAEEERYFRAQTREQLAALKKHKEEEIVHHKKEIERLQKEIERHKQKIKILKHDD

SEQ ID NO: 814 - protein, 106 aa, Artificial Sequence
  Designed; as detailed elsewhere in present application
MAVTALAARTWLGVWGVRTMQARSFGSDQSENLDRGAGAIREAGGAFGKREQAEEERYFRAQTREQLAALKKHKEDEIVHHKKEIERLQKEIERHKQKIKILKHDD

SEQ ID NO: 815 - protein, 106 aa, Artificial Sequence; identical to SEQ ID NO: 727
  Designed; as detailed elsewhere in present application

SEQ ID NO: 816 - protein, 106 aa, Artificial Sequence
  Designed; as detailed elsewhere in present application
MAVTALAARTWLGVWGVRTMQARSFGSDQSENLDRGAGAIREAGGAFGKREQAEEERYFRAQTREQLAALKKHKEEEIVHHKKEIERLQKEIERHKQKIKILKNDD

SEQ ID NO: 817 - protein, 106 aa, Homo sapiens; identical to SEQ ID NO: 639

SEQ ID NO: 818 - protein, 106 aa, Artificial Sequence; identical to SEQ ID NO: 709
  Designed; as detailed elsewhere in present application

SEQ ID NO: 819 - protein, 106 aa, Artificial Sequence; identical to SEQ ID NO: 782
  Designed; as detailed elsewhere in present application

SEQ ID NO: 820 - protein, 106 aa, Artificial Sequence
  Designed; as detailed elsewhere in present application
MAVTALAARTWLGVWGVRTMQARGFGSDQSENVDRGAGAIREAGGAFGKRAQAEEERYFRAQSREQLAALKKHKEEEIVHHKKEIERLQKEIERHKQKIKMLKHDD

SEQ ID NO: 821 - protein, 106 aa, Artificial Sequence
  Designed; as detailed elsewhere in present application
MAVTALAARTWLGVWGVRTMQARGFGSDQSENVDRGAGAIREAGGAFGKREQAEEERYFRAQSREQLAALKKAKEEEIVHHKKEIERLQKEIERHKQKIKMLKHDD

SEQ ID NO: 822 - protein, 106 aa, Artificial Sequence
  Designed; as detailed elsewhere in present application
MAVTALAARTWLGVWGVRTMQARGFGSDQSENVDRGAGAIREAGGAFGKREQAEEERYFRAQSREQLAALKKHKEEEIVAHKKEIERLQKEIERHKQKIKMLKHDD

SEQ ID NO: 823 - protein, 106 aa, Artificial Sequence
  Designed; as detailed elsewhere in present application
MAVTALAARTWLGVWGVRTMQARGFGSDQSENVDRGAGAIREAGGAFGKRAQAEEERYFRAQSREQLAALKKAKEEEIVHHKKEIERLQKEIERHKQKIKMLKHDD

SEQ ID NO: 824 - protein, 106 aa, Artificial Sequence
  Designed; as detailed elsewhere in present application
MAVTALAARTWLGVWGVRTMQARGFGSDQSENVDRGAGAIREAGGAFGKRAQAEEERYFRAQSREQLAALKKHKEEEIVAHKKEIERLQKEIERHKQKIKMLKHDD

SEQ ID NO: 825 - protein, 106 aa, Artificial Sequence
  Designed; as detailed elsewhere in present application
MAVTALAARTWLGVWGVRTMQARGFGSDQSENVDRGAGAIREAGGAFGKREQAEEERYFRAQSREQLAALKKAKEEEIVAHKKEIERLQKEIERHKQKIKMLKHDD

SEQ ID NO: 826 - protein, 106 aa, Artificial Sequence
  Designed; as detailed elsewhere in present application
MAVTALAARTWLGVWGVRTMQARGFGSDQSENVDRGAGAIREAGGAFGKRAQAEEERYFRAQSREQLAALKKAKEEEIVAHKKEIERLQKEIERHKQKIKMLKHDD

SEQ ID NO: 827 - protein, 81 aa, Artificial Sequence
  Designed; as detailed elsewhere in present application
GSDQSENVDRGAGSIREAGGAFGKREQAEEERYFRAQSREQLAALKKHHEEEIVHHKKEIERLQKEIERHKQKIKMLKHDD

SEQ ID NO: 828 - protein, 81 aa, Artificial Sequence
  Designed; as detailed elsewhere in present application
GSDQSENVDRGAGSIREAGGAFGKREQAEEERYFRAQSREQLAALKKHKEEEIVHHKKEIERLQKEIERHKQKIKMLKHDD

SEQ ID NO: 829 - protein, 81 aa, Artificial Sequence
  Designed; as detailed elsewhere in present application
GSDQSENVDRGAGAIREAGGAFGKREQAEEERYFRAQSREQLAALKKHKEEEIVHHKKEIERLQKEIERHKQKIKMLKHDD

SEQ ID NO: 830 - protein, 81 aa, Artificial Sequence
  Designed; as detailed elsewhere in present application
GSDQSENVDRGAGAIREAGGAFGKRAQAEEERYFRAQSREQLAALKKHKEEEIVHHKKEIERLQKEIERHKQKIKMLKHDD

SEQ ID NO: 831 - protein, 81 aa, Artificial Sequence
  Designed; as detailed elsewhere in present application
GSDQSENVDRGAGAIREAGGAFGKREQAEEERYFRAQSREQLAALKKAKEEEIVHHKKEIERLQKEIERHKQKIKMLKHDD

SEQ ID NO: 832 - protein, 81 aa, Artificial Sequence
  Designed; as detailed elsewhere in present application
GSDQSENVDRGAGAIREAGGAFGKREQAEEERYFRAQSREQLAALKKHKEEEIVAHKKEIERLQKEIERHKQKIKMLKHDD

SEQ ID NO: 833 - protein, 81 aa, Artificial Sequence
  Designed; as detailed elsewhere in present application
GSDQSENVDRGAGAIREAGGAFGKRAQAEEERYFRAQSREQLAALKKAKEEEIVHHKKEIERLQKEIERHKQKIKMLKHDD

SEQ ID NO: 834 - protein, 81 aa, Artificial Sequence
  Designed; as detailed elsewhere in present application
GSDQSENVDRGAGAIREAGGAFGKRAQAEEERYFRAQSREQLAALKKHKEEEIVAHKKEIERLQKEIERHKQKIKMLKHDD

SEQ ID NO: 835 - protein, 81 aa, Artificial Sequence
  Designed; as detailed elsewhere in present application
GSDQSENVDRGAGAIREAGGAFGKREQAEEERYFRAQSREQLAALKKAKEEEIVAHKKEIERLQKEIERHKQKIKMLKHDD

SEQ ID NO: 836 - protein, 81 aa, Artificial Sequence
  Designed; as detailed elsewhere in present application
GSDQSENVDRGAGAIREAGGAFGKRAQAEEERYFRAQSREQLAALKKAKEEEIVAHKKEIERLQKEIERHKQKIKMLKHDD

SEQ ID NO: 837 - protein, 109 aa, Bos taurus; identical to SEQ ID NO: 660

SEQ ID NO: 838 - protein, 84 aa, Bos taurus
GSESGDNVRSSAGAVRDAGGAFGKREQAEEERYFRARAKEQLAALKKHHENEISHHAKEIERLQKEIERHKQSIKKLKQSEDDD

SEQ ID NO: 839 - protein, 60 aa, Artificial Sequence
  Designed; as detailed elsewhere in present application
GSESGDNVRSSAGAVRDAGGAFGKREQAEEERYFRARAKEQLAALKKHHENEISHHAKEI

SEQ ID NO: 840 - protein, 56 aa, Artificial Sequence
  Designed; as detailed elsewhere in present application
GSESGDNVRSSAGAVRDAGGAFGKREQAEEERYFRARAKEQLAALKKHHENEISHH

SEQ ID NO: 841 - protein, 75 aa, Artificial Sequence
  Designed; as detailed elsewhere in present application
SSAGAVRDAGGAFGKREQAEEERYFRARAKEQLAALKKHHENEISHHAKEIERLQKEIERHKQSIKKLKQSEDDD

SEQ ID NO: 842 - protein, 38 aa, Artificial Sequence
  Designed; as detailed elsewhere in present application
SSAGAVRDAGGAFGKREQAEEERYFRARAKEQLAALKK

SEQ ID NO: 843 - protein, 37 aa, Artificial Sequence
  Designed; as detailed elsewhere in present application
SSAGAVRDAGGAFGKREQAEEERYFRARAKEQLAALK

SEQ ID NO: 844 - protein, 34 aa, Artificial Sequence; identical to SEQ ID NO: 661
  Designed; as detailed elsewhere in present application

SEQ ID NO: 845 - protein, 25 aa, Artificial Sequence
  Designed; as detailed elsewhere in present application
FGKREQAEEERYFRARAKEQLAALK

SEQ ID NO: 846 - protein, 17 aa, Artificial Sequence
  Designed; as detailed elsewhere in present application
LAALKKHHENEISHHAK

SEQ ID NO: 847 - protein, 4 aa, Artificial Sequence
  Designed; as detailed elsewhere in present application
HHEN

SEQ ID NO: 848 - protein, 5 aa, Artificial Sequence
  Designed; as detailed elsewhere in present application
HHENE

SEQ ID NO: 849 - protein, 6 aa, Artificial Sequence
  Designed; as detailed elsewhere in present application
HHENEI

SEQ ID NO: 850 - protein, 7 aa, Artificial Sequence
  Designed; as detailed elsewhere in present application
HHENEIS

SEQ ID NO: 851 - protein, 8 aa, Artificial Sequence
  Designed; as detailed elsewhere in present application
HHENEISH

SEQ ID NO: 852 - protein, 9 aa, Artificial Sequence
  Designed; as detailed elsewhere in present application
HHENEISHH

SEQ ID NO: 853 - protein, 10 aa, Artificial Sequence
  Designed; as detailed elsewhere in present application
HHENEISHHA

SEQ ID NO: 854 - protein, 11 aa, Artificial Sequence
  Designed; as detailed elsewhere in present application
HHENEISHHAK

SEQ ID NO: 855 - protein, 12 aa, Artificial Sequence
  Designed; as detailed elsewhere in present application
HHENEISHHAKE

SEQ ID NO: 856 - protein, 13 aa, Artificial Sequence
  Designed; as detailed elsewhere in present application
HHENEISHHAKEI

SEQ ID NO: 857 - protein, 14 aa, Artificial Sequence
  Designed; as detailed elsewhere in present application
HHENEISHHAKEIE

SEQ ID NO: 858 - protein, 15 aa, Artificial Sequence
  Designed; as detailed elsewhere in present application
HHENEISHHAKEIER

SEQ ID NO: 859 - protein, 16 aa, Artificial Sequence
  Designed; as detailed elsewhere in present application
HHENEISHHAKEIERL

SEQ ID NO: 860 - protein, 17 aa, Artificial Sequence
  Designed; as detailed elsewhere in present application
HHENEISHHAKEIERLQ

SEQ ID NO: 861 - protein, 18 aa, Artificial Sequence
  Designed; as detailed elsewhere in present application
HHENEISHHAKEIERLQK

SEQ ID NO: 862 - protein, 19 aa, Artificial Sequence
  Designed; as detailed elsewhere in present application
HHENEISHHAKEIERLQKE

SEQ ID NO: 863 - protein, 20 aa, Artificial Sequence
  Designed; as detailed elsewhere in present application
HHENEISHHAKEIERLQKEI

SEQ ID NO: 864 - protein, 21 aa, Artificial Sequence
  Designed; as detailed elsewhere in present application
HHENEISHHAKEIERLQKEIE

SEQ ID NO: 865 - protein, 22 aa, Artificial Sequence
  Designed; as detailed elsewhere in present application
HHENEISHHAKEIERLQKEIER

SEQ ID NO: 866 - protein, 23 aa, Artificial Sequence
  Designed; as detailed elsewhere in present application
HHENEISHHAKEIERLQKEIERH

SEQ ID NO: 867 - protein, 24 aa, Artificial Sequence
  Designed; as detailed elsewhere in present application
HHENEISHHAKEIERLQKEIERHK

SEQ ID NO: 868 - protein, 25 aa, Artificial Sequence
  Designed; as detailed elsewhere in present application
HHENEISHHAKEIERLQKEIERHKQ

SEQ ID NO: 869 - protein, 106 aa, Homo sapiens; identical to SEQ ID NO: 639

SEQ ID NO: 870 - protein, 81 aa, Homo sapiens; identical to SEQ ID NO: 827

SEQ ID NO: 871 - protein, 60 aa, Artificial Sequence
  Designed; as detailed elsewhere in present application
GSDQSENVDRGAGSIREAGGAFGKREQAEEERYFRAQSREQLAALKKHHEEEIVHHKKEI

SEQ ID NO: 872 - protein, 56 aa, Artificial Sequence
  Designed; as detailed elsewhere in present application
GSDQSENVDRGAGSIREAGGAFGKREQAEEERYFRAQSREQLAALKKHHEEEIVHH

SEQ ID NO: 873 - protein, 47 aa, Artificial Sequence
  Designed; as detailed elsewhere in present application
GSDQSENVDRGAGSIREAGGAFGKREQAEEERYFRAQSREQLAALKK

SEQ ID NO: 874 - protein, 72 aa, Artificial Sequence
  Designed; as detailed elsewhere in present application
RGAGSIREAGGAFGKREQAEEERYFRAQSREQLAALKKHHEEEIVHHKKEIERLQKEIERHKQKIKMLKHDD

SEQ ID NO: 875 - protein, 38 aa, Artificial Sequence
  Designed; as detailed elsewhere in present application
RGAGSIREAGGAFGKREQAEEERYFRAQSREQLAALKK

SEQ ID NO: 876 - protein, 37 aa, Artificial Sequence
  Designed; as detailed elsewhere in present application
RGAGSIREAGGAFGKREQAEEERYFRAQSREQLAALK

SEQ ID NO: 877 - protein, 34 aa, Artificial Sequence
  Designed; as detailed elsewhere in present application
SIREAGGAFGKREQAEEERYFRAQSREQLAALKK

SEQ ID NO: 878 - protein, 33 aa, Artificial Sequence
  Designed; as detailed elsewhere in present application
IREAGGAFGKREQAEEERYFRAQSREQLAALKK

SEQ ID NO: 879 - protein, 34 aa, Artificial Sequence
  Designed; as detailed elsewhere in present application
AIREAGGAFGKRAQAEEERYFRAQSREQLAALKK

SEQ ID NO: 880 - protein, 25 aa, Artificial Sequence
  Designed; as detailed elsewhere in present application
FGKREQAEEERYFRAQSREQLAALK

SEQ ID NO: 881 - protein, 17 aa, Artificial Sequence
  Designed; as detailed elsewhere in present application
LAALKKHHEEEIVHHKK

SEQ ID NO: 882 - protein, 4 aa, Artificial Sequence
  Designed; as detailed elsewhere in present application
HHEE

SEQ ID NO: 883 - protein, 5 aa, Artificial Sequence
  Designed; as detailed elsewhere in present application
HHEEE

SEQ ID NO: 884 - protein, 6 aa, Artificial Sequence
  Designed; as detailed elsewhere in present application
HHEEEI

SEQ ID NO: 885 - protein, 7 aa, Artificial Sequence
  Designed; as detailed elsewhere in present application
HHEEEIV

SEQ ID NO: 886 - protein, 8 aa, Artificial Sequence
  Designed; as detailed elsewhere in present application
HHEEEIVH

SEQ ID NO: 887 - protein, 9 aa, Artificial Sequence
  Designed; as detailed elsewhere in present application
HHEEEIVHH

SEQ ID NO: 888 - protein, 10 aa, Artificial Sequence
  Designed; as detailed elsewhere in present application
HHEEEIVHHK

SEQ ID NO: 889 - protein, 11 aa, Artificial Sequence
  Designed; as detailed elsewhere in present application
HHEEEIVHHKK

SEQ ID NO: 890 - protein, 12 aa, Artificial Sequence
  Designed; as detailed elsewhere in present application
HHEEEIVHHKKE

SEQ ID NO: 891 - protein, 13 aa, Artificial Sequence
  Designed; as detailed elsewhere in present application
HHEEEIVHHKKEI

SEQ ID NO: 892 - protein, 14 aa, Artificial Sequence
  Designed; as detailed elsewhere in present application
HHEEEIVHHKKEIE

SEQ ID NO: 893 - protein, 15 aa, Artificial Sequence
  Designed; as detailed elsewhere in present application
HHEEEIVHHKKEIER

SEQ ID NO: 894 - protein, 16 aa, Artificial Sequence
  Designed; as detailed elsewhere in present application
HHEEEIVHHKKEIERL

SEQ ID NO: 895 - protein, 106 aa, Homo sapiens; identical to SEQ ID NO: 639

SEQ ID NO: 896 - protein, 85 aa, Artificial Sequence
  Designed; as detailed elsewhere in present application
MAVTALAARTWLGVWGVRTMQARGFGSDQSENVDRGAGSIREAGGAFGKREQAEEERYFRAQSREQLAALKKHHEEEIVHHKKEI

SEQ ID NO: 897 - protein, 81 aa, Artificial Sequence
  Designed; as detailed elsewhere in present application
MAVTALAARTWLGVWGVRTMQARGFGSDQSENVDRGAGSIREAGGAFGKREQAEEERYFRAQSREQLAALKKHHEEEIVHH

SEQ ID NO: 898 - protein, 72 aa, Artificial Sequence
  Designed; as detailed elsewhere in present application
MAVTALAARTWLGVWGVRTMQARGFGSDQSENVDRGAGSIREAGGAFGKREQAEEERYFRAQSREQLAALKK

SEQ ID NO: 899 - protein, 97 aa, Artificial Sequence
  Designed; as detailed elsewhere in present application
MAVTALAARTWLGVWGVRTMQARGFRGAGSIREAGGAFGKREQAEEERYFRAQSREQLAALKKHHEEEIVHHKKEIERLQKEIERHKQKIKMLKHDD

SEQ ID NO: 900 - protein, 63 aa, Artificial Sequence
  Designed; as detailed elsewhere in present application
MAVTALAARTWLGVWGVRTMQARGFRGAGSIREAGGAFGKREQAEEERYFRAQSREQLAALKK

SEQ ID NO: 901 - protein, 62 aa, Artificial Sequence
  Designed; as detailed elsewhere in present application
MAVTALAARTWLGVWGVRTMQARGFRGAGSIREAGGAFGKREQAEEERYFRAQSREQLAALK

SEQ ID NO: 902 - protein, 59 aa, Artificial Sequence
  Designed; as detailed elsewhere in present application
MAVTALAARTWLGVWGVRTMQARGFSIREAGGAFGKREQAEEERYFRAQSREQLAALKK

SEQ ID NO: 903 - protein, 58 aa, Artificial Sequence
  Designed; as detailed elsewhere in present application
MAVTALAARTWLGVWGVRTMQARGFIREAGGAFGKREQAEEERYFRAQSREQLAALKK

SEQ ID NO: 904 - protein, 59 aa, Artificial Sequence
  Designed; as detailed elsewhere in present application
MAVTALAARTWLGVWGVRTMQARGFAIREAGGAFGKRAQAEEERYFRAQSREQLAALKK

SEQ ID NO: 905 - protein, 50 aa, Artificial Sequence
  Designed; as detailed elsewhere in present application
MAVTALAARTWLGVWGVRTMQARGFFGKREQAEEERYFRAQSREQLAALK

SEQ ID NO: 906 - protein, 42 aa, Artificial Sequence
  Designed; as detailed elsewhere in present application
MAVTALAARTWLGVWGVRTMQARGFLAALKKHHEEEIVHHKK

SEQ ID NO: 907 - protein, 26 aa, Artificial Sequence
  Designed; as detailed elsewhere in present application
MAVTALAARTWLGVWGVRTMQARGFH

SEQ ID NO: 908 - protein, 27 aa, Artificial Sequence
  Designed; as detailed elsewhere in present application
MAVTALAARTWLGVWGVRTMQARGFHH

SEQ ID NO: 909 - protein, 28 aa, Artificial Sequence
  Designed; as detailed elsewhere in present application
MAVTALAARTWLGVWGVRTMQARGFHHE

SEQ ID NO: 910 - protein, 29 aa, Artificial Sequence
  Designed; as detailed elsewhere in present application
MAVTALAARTWLGVWGVRTMQARGFHHEE

SEQ ID NO: 911 - protein, 30 aa, Artificial Sequence
  Designed; as detailed elsewhere in present application
MAVTALAARTWLGVWGVRTMQARGFHHEEE

SEQ ID NO: 912 - protein, 31 aa, Artificial Sequence
  Designed; as detailed elsewhere in present application
MAVTALAARTWLGVWGVRTMQARGFHHEEEI

SEQ ID NO: 913 - protein, 32 aa, Artificial Sequence
  Designed; as detailed elsewhere in present application
MAVTALAARTWLGVWGVRTMQARGFHHEEEIV

SEQ ID NO: 914 - protein, 33 aa, Artificial Sequence
  Designed; as detailed elsewhere in present application
MAVTALAARTWLGVWGVRTMQARGFHHEEEIVH

SEQ ID NO: 915 - protein, 34 aa, Artificial Sequence
  Designed; as detailed elsewhere in present application
MAVTALAARTWLGVWGVRTMQARGFHHEEEIVHH

SEQ ID NO: 916 - protein, 35 aa, Artificial Sequence
  Designed; as detailed elsewhere in present application
MAVTALAARTWLGVWGVRTMQARGFHHEEEIVHHK

SEQ ID NO: 917 - protein, 36 aa, Artificial Sequence
  Designed; as detailed elsewhere in present application
MAVTALAARTWLGVWGVRTMQARGFHHEEEIVHHKK

SEQ ID NO: 918 - protein, 37 aa, Artificial Sequence
  Designed; as detailed elsewhere in present application
MAVTALAARTWLGVWGVRTMQARGFHHEEEIVHHKKE

SEQ ID NO: 919 - protein, 38 aa, Artificial Sequence
  Designed; as detailed elsewhere in present application
MAVTALAARTWLGVWGVRTMQARGFHHEEEIVHHKKEI

SEQ ID NO: 920 - protein, 39 aa, Artificial Sequence
  Designed; as detailed elsewhere in present application
MAVTALAARTWLGVWGVRTMQARGFHHEEEIVHHKKEIE

SEQ ID NO: 921 - protein, 40 aa, Artificial Sequence
  Designed; as detailed elsewhere in present application
MAVTALAARTWLGVWGVRTMQARGFHHEEEIVHHKKEIER

SEQ ID NO: 922 - protein, 41 aa, Artificial Sequence
  Designed; as detailed elsewhere in present application
MAVTALAARTWLGVWGVRTMQARGFHHEEEIVHHKKEIERL

SEQ ID NO: 923 - protein, 118 aa, Artificial Sequence
  Designed; as detailed elsewhere in present application
YGRKKRRQRRRGMAVTALAARTWLGVWGVRTMQARGFGSDQSENVDRGAGSIREAGGAFGKREQAEEERYFRAQSREQLAALKKHHEEEIVHHKKEIERLQKEIERHKQKIKMLKHDD

SEQ ID NO: 924 - protein, 97 aa, Artificial Sequence
  Designed; as detailed elsewhere in present application
YGRKKRRQRRRGMAVTALAARTWLGVWGVRTMQARGFGSDQSENVDRGAGSIREAGGAFGKREQAEEERYFRAQSREQLAALKKHHEEEIVHHKKEI

SEQ ID NO: 925 - protein, 93 aa, Artificial Sequence
  Designed; as detailed elsewhere in present application
YGRKKRRQRRRGMAVTALAARTWLGVWGVRTMQARGFGSDQSENVDRGAGSIREAGGAFGKREQAEEERYFRAQSREQLAALKKHHEEEIVHH

SEQ ID NO: 926 - protein, 84 aa, Artificial Sequence
  Designed; as detailed elsewhere in present application
YGRKKRRQRRRGMAVTALAARTWLGVWGVRTMQARGFGSDQSENVDRGAGSIREAGGAFGKREQAEEERYFRAQSREQLAALKK

SEQ ID NO: 927 - protein, 109 aa, Artificial Sequence
  Designed; as detailed elsewhere in present application
YGRKKRRQRRRGMAVTALAARTWLGVWGVRTMQARGFRGAGSIREAGGAFGKREQAEEERYFRAQSREQLAALKKHHEEEIVHHKKEIERLQKEIERHKQKIKMLKHDD

SEQ ID NO: 928 - protein, 75 aa, Artificial Sequence
  Designed; as detailed elsewhere in present application
YGRKKRRQRRRGMAVTALAARTWLGVWGVRTMQARGFRGAGSIREAGGAFGKREQAEEERYFRAQSREQLAALKK

SEQ ID NO: 929 - protein, 74 aa, Artificial Sequence
  Designed; as detailed elsewhere in present application
YGRKKRRQRRRGMAVTALAARTWLGVWGVRTMQARGFRGAGSIREAGGAFGKREQAEEERYFRAQSREQLAALK

SEQ ID NO: 930 - protein, 71 aa, Artificial Sequence
  Designed; as detailed elsewhere in present application
YGRKKRRQRRRGMAVTALAARTWLGVWGVRTMQARGFSIREAGGAFGKREQAEEERYFRAQSREQLAALKK

SEQ ID NO: 931 - protein, 70 aa, Artificial Sequence
  Designed; as detailed elsewhere in present application
YGRKKRRQRRRGMAVTALAARTWLGVWGVRTMQARGFIREAGGAFGKREQAEEERYFRAQSREQLAALKK

SEQ ID NO: 932 - protein, 71 aa, Artificial Sequence
  Designed; as detailed elsewhere in present application
YGRKKRRQRRRGMAVTALAARTWLGVWGVRTMQARGFAIREAGGAFGKRAQAEEERYFRAQSREQLAALKK

SEQ ID NO: 933 - protein, 62 aa, Artificial Sequence
  Designed; as detailed elsewhere in present application
YGRKKRRQRRRGMAVTALAARTWLGVWGVRTMQARGFFGKREQAEEERYFRAQSREQLAALK

SEQ ID NO: 934 - protein, 54 aa, Artificial Sequence
  Designed; as detailed elsewhere in present application
YGRKKRRQRRRGMAVTALAARTWLGVWGVRTMQARGFLAALKKHHEEEIVHHKK

SEQ ID NO: 935 - protein, 38 aa, Artificial Sequence
  Designed; as detailed elsewhere in present application
YGRKKRRQRRRGMAVTALAARTWLGVWGVRTMQARGFH

SEQ ID NO: 936 - protein, 39 aa, Artificial Sequence
  Designed; as detailed elsewhere in present application
YGRKKRRQRRRGMAVTALAARTWLGVWGVRTMQARGFHH

SEQ ID NO: 937 - protein, 40 aa, Artificial Sequence
  Designed; as detailed elsewhere in present application
YGRKKRRQRRRGMAVTALAARTWLGVWGVRTMQARGFHHE

SEQ ID NO: 938 - protein, 41 aa, Artificial Sequence
  Designed; as detailed elsewhere in present application
YGRKKRRQRRRGMAVTALAARTWLGVWGVRTMQARGFHHEE

SEQ ID NO: 939 - protein, 42 aa, Artificial Sequence
  Designed; as detailed elsewhere in present application
YGRKKRRQRRRGMAVTALAARTWLGVWGVRTMQARGFHHEEE

SEQ ID NO: 940 - protein, 43 aa, Artificial Sequence
  Designed; as detailed elsewhere in present application
YGRKKRRQRRRGMAVTALAARTWLGVWGVRTMQARGFHHEEEI

SEQ ID NO: 941 - protein, 44 aa, Artificial Sequence
  Designed; as detailed elsewhere in present application
YGRKKRRQRRRGMAVTALAARTWLGVWGVRTMQARGFHHEEEIV

SEQ ID NO: 942 - protein, 45 aa, Artificial Sequence
  Designed; as detailed elsewhere in present application
YGRKKRRQRRRGMAVTALAARTWLGVWGVRTMQARGFHHEEEIVH

SEQ ID NO: 943 - protein, 46 aa, Artificial Sequence
  Designed; as detailed elsewhere in present application
YGRKKRRQRRRGMAVTALAARTWLGVWGVRTMQARGFHHEEEIVHH

SEQ ID NO: 944 - protein, 47 aa, Artificial Sequence
  Designed; as detailed elsewhere in present application
YGRKKRRQRRRGMAVTALAARTWLGVWGVRTMQARGFHHEEEIVHHK

SEQ ID NO: 945 - protein, 48 aa, Artificial Sequence
  Designed; as detailed elsewhere in present application
YGRKKRRQRRRGMAVTALAARTWLGVWGVRTMQARGFHHEEEIVHHKK

SEQ ID NO: 946 - protein, 49 aa, Artificial Sequence
  Designed; as detailed elsewhere in present application
YGRKKRRQRRRGMAVTALAARTWLGVWGVRTMQARGFHHEEEIVHHKKE

SEQ ID NO: 947 - protein, 50 aa, Artificial Sequence
  Designed; as detailed elsewhere in present application
YGRKKRRQRRRGMAVTALAARTWLGVWGVRTMQARGFHHEEEIVHHKKEI

SEQ ID NO: 948 - protein, 51 aa, Artificial Sequence
  Designed; as detailed elsewhere in present application
YGRKKRRQRRRGMAVTALAARTWLGVWGVRTMQARGFHHEEEIVHHKKEIE

SEQ ID NO: 949 - protein, 52 aa, Artificial Sequence
  Designed; as detailed elsewhere in present application
YGRKKRRQRRRGMAVTALAARTWLGVWGVRTMQARGFHHEEEIVHHKKEIER

SEQ ID NO: 950 - protein, 53 aa, Artificial Sequence
  Designed; as detailed elsewhere in present application
YGRKKRRQRRRGMAVTALAARTWLGVWGVRTMQARGFHHEEEIVHHKKEIERL

SEQ ID NO: 951 - protein, 125 aa, Artificial Sequence
  Designed; as detailed elsewhere in present application
HHHHHHGYGRKKRRQRRRGMAVTALAARTWLGVWGVRTMQARGFGSDQSENVDRGAGSIREAGGAFGKREQAEEERYFRAQSREQLAALKKHHEEEIVHHKKEIERLQKEIERHKQKIKMLKHDD

SEQ ID NO: 952 - protein, 104 aa, Artificial Sequence
  Designed; as detailed elsewhere in present application
HHHHHHGYGRKKRRQRRRGMAVTALAARTWLGVWGVRTMQARGFGSDQSENVDRGAGSIREAGGAFGKREQAEEERYFRAQSREQLAALKKHHEEEIVHHKKEI

SEQ ID NO: 953 - protein, 100 aa, Artificial Sequence
  Designed; as detailed elsewhere in present application
HHHHHHGYGRKKRRQRRRGMAVTALAARTWLGVWGVRTMQARGFGSDQSENVDRGAGSIREAGGAFGKREQAEEERYFRAQSREQLAALKKHHEEEIVHH

SEQ ID NO: 954 - protein, 91 aa, Artificial Sequence
  Designed; as detailed elsewhere in present application
HHHHHHGYGRKKRRQRRRGMAVTALAARTWLGVWGVRTMQARGFGSDQSENVDRGAGSIREAGGAFGKREQAEEERYFRAQSREQLAALKK

SEQ ID NO: 955 - protein, 124 aa, Artificial Sequence
  Designed; as detailed elsewhere in present application
HHHHHHDYKDDDDKGYGRKKRRQRRRGMAVTALAARTWLGVWGVRTMQARGFRGAGSIREAGGAFGKREQAEEERYFRAQSREQLAALKKHHEEEIVHHKKEIERLQKEIERHKQKIKMLKHDD

SEQ ID NO: 956 - protein, 90 aa, Artificial Sequence
  Designed; as detailed elsewhere in present application
HHHHHHDYKDDDDKGYGRKKRRQRRRGMAVTALAARTWLGVWGVRTMQARGFRGAGSIREAGGAFGKREQAEEERYFRAQSREQLAALKK

SEQ ID NO: 957 - protein, 89 aa, Artificial Sequence
  Designed; as detailed elsewhere in present application
HHHHHHDYKDDDDKGYGRKKRRQRRRGMAVTALAARTWLGVWGVRTMQARGFRGAGSIREAGGAFGKREQAEEERYFRAQSREQLAALK

SEQ ID NO: 958 - protein, 86 aa, Artificial Sequence
  Designed; as detailed elsewhere in present application
HHHHHHDYKDDDDKGYGRKKRRQRRRGMAVTALAARTWLGVWGVRTMQARGFSIREAGGAFGKREQAEEERYFRAQSREQLAALKK

SEQ ID NO: 959 - protein, 85 aa, Artificial Sequence
  Designed; as detailed elsewhere in present application
HHHHHHDYKDDDDKGYGRKKRRQRRRGMAVTALAARTWLGVWGVRTMQARGFIREAGGAFGKREQAEEERYFRAQSREQLAALKK

SEQ ID NO: 960 - protein, 86 aa, Artificial Sequence
  Designed; as detailed elsewhere in present application
HHHHHHDYKDDDDKGYGRKKRRQRRRGMAVTALAARTWLGVWGVRTMQARGFAIREAGGAFGKRAQAEEERYFRAQSREQLAALKK

SEQ ID NO: 961 - protein, 77 aa, Artificial Sequence
  Designed; as detailed elsewhere in present application
HHHHHHDYKDDDDKGYGRKKRRQRRRGMAVTALAARTWLGVWGVRTMQARGFFGKREQAEEERYFRAQSREQLAALK

SEQ ID NO: 962 - protein, 69 aa, Artificial Sequence
  Designed; as detailed elsewhere in present application
HHHHHHDYKDDDDKGYGRKKRRQRRRGMAVTALAARTWLGVWGVRTMQARGFLAALKKHHEEEIVHHKK

SEQ ID NO: 963 - protein, 53 aa, Artificial Sequence
  Designed; as detailed elsewhere in present application
HHHHHHDYKDDDDKGYGRKKRRQRRRGMAVTALAARTWLGVWGVRTMQARGFH

SEQ ID NO: 964 - protein, 54 aa, Artificial Sequence
  Designed; as detailed elsewhere in present application
HHHHHHDYKDDDDKGYGRKKRRQRRRGMAVTALAARTWLGVWGVRTMQARGFHH

SEQ ID NO: 965 - protein, 55 aa, Artificial Sequence
  Designed; as detailed elsewhere in present application
HHHHHHDYKDDDDKGYGRKKRRQRRRGMAVTALAARTWLGVWGVRTMQARGFHHE

SEQ ID NO: 966 - protein, 56 aa, Artificial Sequence
  Designed; as detailed elsewhere in present application
HHHHHHDYKDDDDKGYGRKKRRQRRRGMAVTALAARTWLGVWGVRTMQARGFHHEE

SEQ ID NO: 967 - protein, 57 aa, Artificial Sequence
  Designed; as detailed elsewhere in present application
HHHHHHDYKDDDDKGYGRKKRRQRRRGMAVTALAARTWLGVWGVRTMQARGFHHEEE

SEQ ID NO: 968 - protein, 58 aa, Artificial Sequence
  Designed; as detailed elsewhere in present application
HHHHHHDYKDDDDKGYGRKKRRQRRRGMAVTALAARTWLGVWGVRTMQARGFHHEEEI

SEQ ID NO: 969 - protein, 59 aa, Artificial Sequence
  Designed; as detailed elsewhere in present application
HHHHHHDYKDDDDKGYGRKKRRQRRRGMAVTALAARTWLGVWGVRTMQARGFHHEEEIV

SEQ ID NO: 970 - protein, 60 aa, Artificial Sequence
  Designed; as detailed elsewhere in present application
HHHHHHDYKDDDDKGYGRKKRRQRRRGMAVTALAARTWLGVWGVRTMQARGFHHEEEIVH

SEQ ID NO: 971 - protein, 61 aa, Artificial Sequence
  Designed; as detailed elsewhere in present application
HHHHHHDYKDDDDKGYGRKKRRQRRRGMAVTALAARTWLGVWGVRTMQARGFHHEEEIVHH

SEQ ID NO: 972 - protein, 62 aa, Artificial Sequence
  Designed; as detailed elsewhere in present application
HHHHHHDYKDDDDKGYGRKKRRQRRRGMAVTALAARTWLGVWGVRTMQARGFHHEEEIVHHK

SEQ ID NO: 973 - protein, 63 aa, Artificial Sequence
  Designed; as detailed elsewhere in present application
HHHHHHDYKDDDDKGYGRKKRRQRRRGMAVTALAARTWLGVWGVRTMQARGFHHEEEIVHHKK

SEQ ID NO: 974 - protein, 64 aa, Artificial Sequence
  Designed; as detailed elsewhere in present application
HHHHHHDYKDDDDKGYGRKKRRQRRRGMAVTALAARTWLGVWGVRTMQARGFHHEEEIVHHKKE

SEQ ID NO: 975 - protein, 65 aa, Artificial Sequence
  Designed; as detailed elsewhere in present application
HHHHHHDYKDDDDKGYGRKKRRQRRRGMAVTALAARTWLGVWGVRTMQARGFHHEEEIVHHKKEI

SEQ ID NO: 976 - protein, 66 aa, Artificial Sequence
  Designed; as detailed elsewhere in present application
HHHHHHDYKDDDDKGYGRKKRRQRRRGMAVTALAARTWLGVWGVRTMQARGFHHEEEIVHHKKEIE

SEQ ID NO: 977 - protein, 67 aa, Artificial Sequence
  Designed; as detailed elsewhere in present application
HHHHHHDYKDDDDKGYGRKKRRQRRRGMAVTALAARTWLGVWGVRTMQARGFHHEEEIVHHKKEIER

SEQ ID NO: 978 - protein, 68 aa, Artificial Sequence
  Designed; as detailed elsewhere in present application
HHHHHHDYKDDDDKGYGRKKRRQRRRGMAVTALAARTWLGVWGVRTMQARGFHHEEEIVHHKKEIERL

SEQ ID NO: 979 - protein, 11 aa, Artificial Sequence
  Designed; as detailed elsewhere in present application
HHEEEIVHHKK

SEQ ID NO: 980 - protein, 4 aa, Artificial Sequence
  Designed; as detailed elsewhere in present application
HHEE

SEQ ID NO: 981 - protein, 4 aa, Artificial Sequence
  Designed; as detailed elsewhere in present application
HEEE

SEQ ID NO: 982 - protein, 4 aa, Artificial Sequence
  Designed; as detailed elsewhere in present application
EEEI

SEQ ID NO: 983 - protein, 4 aa, Artificial Sequence
  Designed; as detailed elsewhere in present application
EEIV

SEQ ID NO: 984 - protein, 4 aa, Artificial Sequence
  Designed; as detailed elsewhere in present application
EIVH

SEQ ID NO: 985 - protein, 4 aa, Artificial Sequence
  Designed; as detailed elsewhere in present application
IVHH

SEQ ID NO: 986 - protein, 4 aa, Artificial Sequence
  Designed; as detailed elsewhere in present application
VHHK

SEQ ID NO: 987 - protein, 4 aa, Artificial Sequence
  Designed; as detailed elsewhere in present application
HHKK

SEQ ID NO: 988 - protein, 5 aa, Artificial Sequence
  Designed; as detailed elsewhere in present application
HHEEE

SEQ ID NO: 989 - protein, 5 aa, Artificial Sequence
  Designed; as detailed elsewhere in present application
HEEEI

SEQ ID NO: 990 - protein, 5 aa, Artificial Sequence
  Designed; as detailed elsewhere in present application
EEEIV

SEQ ID NO: 991 - protein, 5 aa, Artificial Sequence
  Designed; as detailed elsewhere in present application
EEIVH

SEQ ID NO: 992 - protein, 5 aa, Artificial Sequence
  Designed; as detailed elsewhere in present application
EIVHH

SEQ ID NO: 993 - protein, 5 aa, Artificial Sequence
  Designed; as detailed elsewhere in present application
IVHHK

SEQ ID NO: 994 - protein, 5 aa, Artificial Sequence
  Designed; as detailed elsewhere in present application
VHHKK

SEQ ID NO: 995 - protein, 11 aa, Artificial Sequence
  Designed; as detailed elsewhere in present application
HHEEEIVHHKK

SEQ ID NO: 996 - protein, 6 aa, Artificial Sequence
  Designed; as detailed elsewhere in present application
HHEEEI

SEQ ID NO: 997 - protein, 6 aa, Artificial Sequence
  Designed; as detailed elsewhere in present application
HEEEIV

SEQ ID NO: 998 - protein, 6 aa, Artificial Sequence
  Designed; as detailed elsewhere in present application
EEEIVH

SEQ ID NO: 999 - protein, 6 aa, Artificial Sequence
  Designed; as detailed elsewhere in present application
EEIVHH

SEQ ID NO: 1000 - protein, 6 aa, Artificial Sequence
  Designed; as detailed elsewhere in present application
EIVHHK

SEQ ID NO: 1001 - protein, 6 aa, Artificial Sequence
  Designed; as detailed elsewhere in present application
IVHHKK

SEQ ID NO: 1002 - protein, 7 aa, Artificial Sequence
  Designed; as detailed elsewhere in present application
HHEEEIV

SEQ ID NO: 1003 - protein, 7 aa, Artificial Sequence
  Designed; as detailed elsewhere in present application
HEEEIVH

SEQ ID NO: 1004 - protein, 7 aa, Artificial Sequence
  Designed; as detailed elsewhere in present application
EEEIVHH

SEQ ID NO: 1005 - protein, 7 aa, Artificial Sequence
  Designed; as detailed elsewhere in present application
EEIVHHK

SEQ ID NO: 1006 - protein, 7 aa, Artificial Sequence
  Designed; as detailed elsewhere in present application
EIVHHKK

SEQ ID NO: 1007 - protein, 8 aa, Artificial Sequence
  Designed; as detailed elsewhere in present application
HHEEEIVH

SEQ ID NO: 1008 - protein, 8 aa, Artificial Sequence
  Designed; as detailed elsewhere in present application
HEEEIVHH

SEQ ID NO: 1009 - protein, 8 aa, Artificial Sequence
  Designed; as detailed elsewhere in present application
EEEIVHHK

SEQ ID NO: 1010 - protein, 8 aa, Artificial Sequence
  Designed; as detailed elsewhere in present application
EEIVHHKK

SEQ ID NO: 1011 - protein, 9 aa, Artificial Sequence
  Designed; as detailed elsewhere in present application
HHEEEIVHH

SEQ ID NO: 1012 - protein, 9 aa, Artificial Sequence
  Designed; as detailed elsewhere in present application
HEEEIVHHK

SEQ ID NO: 1013 - protein, 9 aa, Artificial Sequence
  Designed; as detailed elsewhere in present application
EEEIVHHKK

SEQ ID NO: 1014 - protein, 10 aa, Artificial Sequence
  Designed; as detailed elsewhere in present application
HHEEEIVHHK

SEQ ID NO: 1015 - protein, 10 aa, Artificial Sequence
  Designed; as detailed elsewhere in present application
HEEEIVHHKK

SEQ ID NO: 1016 - protein, 11 aa, Artificial Sequence
  Designed; as detailed elsewhere in present application
HHEEEIVHHKK

SEQ ID NO: 1017 - protein, 27 aa, Artificial Sequence
  Designed; as detailed elsewhere in present application
MAVTALAARTWLGVWGVRTMQARGFHH

SEQ ID NO: 1018 - protein, 27 aa, Artificial Sequence
  Designed; as detailed elsewhere in present application
MAVTALAARTWLGVWGVRTMQARGFHE

SEQ ID NO: 1019 - protein, 27 aa, Artificial Sequence
  Designed; as detailed elsewhere in present application
MAVTALAARTWLGVWGVRTMQARGFEE

SEQ ID NO: 1020 - protein, 27 aa, Artificial Sequence
  Designed; as detailed elsewhere in present application
MAVTALAARTWLGVWGVRTMQARGFEE

SEQ ID NO: 1021 - protein, 27 aa, Artificial Sequence
  Designed; as detailed elsewhere in present application
MAVTALAARTWLGVWGVRTMQARGFEI

SEQ ID NO: 1022 - protein, 27 aa, Artificial Sequence
  Designed; as detailed elsewhere in present application
MAVTALAARTWLGVWGVRTMQARGFIV

SEQ ID NO: 1023 - protein, 27 aa, Artificial Sequence
  Designed; as detailed elsewhere in present application
MAVTALAARTWLGVWGVRTMQARGFVH

SEQ ID NO: 1024 - protein, 27 aa, Artificial Sequence
  Designed; as detailed elsewhere in present application
MAVTALAARTWLGVWGVRTMQARGFHH

SEQ ID NO: 1025 - protein, 27 aa, Artificial Sequence
  Designed; as detailed elsewhere in present application
MAVTALAARTWLGVWGVRTMQARGFHK

SEQ ID NO: 1026 - protein, 27 aa, Artificial Sequence
  Designed; as detailed elsewhere in present application
MAVTALAARTWLGVWGVRTMQARGFKK

SEQ ID NO: 1027 - protein, 28 aa, Artificial Sequence
  Designed; as detailed elsewhere in present application
MAVTALAARTWLGVWGVRTMQARGFHHE

SEQ ID NO: 1028 - protein, 28 aa, Artificial Sequence
  Designed; as detailed elsewhere in present application
MAVTALAARTWLGVWGVRTMQARGFHEE

SEQ ID NO: 1029 - protein, 28 aa, Artificial Sequence
  Designed; as detailed elsewhere in present application
MAVTALAARTWLGVWGVRTMQARGFEEE

SEQ ID NO: 1030 - protein, 28 aa, Artificial Sequence
  Designed; as detailed elsewhere in present application
MAVTALAARTWLGVWGVRTMQARGFEEI

SEQ ID NO: 1031 - protein, 28 aa, Artificial Sequence
  Designed; as detailed elsewhere in present application
MAVTALAARTWLGVWGVRTMQARGFEIV

SEQ ID NO: 1032 - protein, 28 aa, Artificial Sequence
  Designed; as detailed elsewhere in present application
MAVTALAARTWLGVWGVRTMQARGFIVH

SEQ ID NO: 1033 - protein, 28 aa, Artificial Sequence
  Designed; as detailed elsewhere in present application
MAVTALAARTWLGVWGVRTMQARGFVHH

SEQ ID NO: 1034 - protein, 28 aa, Artificial Sequence
  Designed; as detailed elsewhere in present application
MAVTALAARTWLGVWGVRTMQARGFHHK

SEQ ID NO: 1035 - protein, 28 aa, Artificial Sequence
  Designed; as detailed elsewhere in present application
MAVTALAARTWLGVWGVRTMQARGFHKK

SEQ ID NO: 1036 - protein, 29 aa, Artificial Sequence
  Designed; as detailed elsewhere in present application
MAVTALAARTWLGVWGVRTMQARGFHHEE

SEQ ID NO: 1037 - protein, 29 aa, Artificial Sequence
  Designed; as detailed elsewhere in present application
MAVTALAARTWLGVWGVRTMQARGFHEEE

SEQ ID NO: 1038 - protein, 29 aa, Artificial Sequence
  Designed; as detailed elsewhere in present application
MAVTALAARTWLGVWGVRTMQARGFEEEI

SEQ ID NO: 1039 - protein, 29 aa, Artificial Sequence
  Designed; as detailed elsewhere in present application
MAVTALAARTWLGVWGVRTMQARGFEEIV

SEQ ID NO: 1040 - protein, 29 aa, Artificial Sequence
  Designed; as detailed elsewhere in present application
MAVTALAARTWLGVWGVRTMQARGFEIVH

SEQ ID NO: 1041 - protein, 29 aa, Artificial Sequence
  Designed; as detailed elsewhere in present application
MAVTALAARTWLGVWGVRTMQARGFIVHH

SEQ ID NO: 1042 - protein, 29 aa, Artificial Sequence
  Designed; as detailed elsewhere in present application
MAVTALAARTWLGVWGVRTMQARGFVHHK

SEQ ID NO: 1043 - protein, 29 aa, Artificial Sequence
  Designed; as detailed elsewhere in present application
MAVTALAARTWLGVWGVRTMQARGFHHKK

SEQ ID NO: 1044 - protein, 30 aa, Artificial Sequence; identical to SEQ ID NO: 911
  Designed; as detailed elsewhere in present application

SEQ ID NO: 1045 - protein, 30 aa, Artificial Sequence
  Designed; as detailed elsewhere in present application
MAVTALAARTWLGVWGVRTMQARGFHEEEI

SEQ ID NO: 1046 - protein, 30 aa, Artificial Sequence
  Designed; as detailed elsewhere in present application
MAVTALAARTWLGVWGVRTMQARGFEEEIV

SEQ ID NO: 1047 - protein, 30 aa, Artificial Sequence
  Designed; as detailed elsewhere in present application
MAVTALAARTWLGVWGVRTMQARGFEEIVH

SEQ ID NO: 1048 - protein, 30 aa, Artificial Sequence
  Designed; as detailed elsewhere in present application
MAVTALAARTWLGVWGVRTMQARGFEIVHH

SEQ ID NO: 1049 - protein, 30 aa, Artificial Sequence
  Designed; as detailed elsewhere in present application
MAVTALAARTWLGVWGVRTMQARGFIVHHK

SEQ ID NO: 1050 - protein, 30 aa, Artificial Sequence
  Designed; as detailed elsewhere in present application
MAVTALAARTWLGVWGVRTMQARGFVHHKK

SEQ ID NO: 1051 - protein, 31 aa, Artificial Sequence; identical to SEQ ID NO: 912
  Designed; as detailed elsewhere in present application

SEQ ID NO: 1052 - protein, 31 aa, Artificial Sequence
  Designed; as detailed elsewhere in present application
MAVTALAARTWLGVWGVRTMQARGFHEEEIV

SEQ ID NO: 1053 - protein, 31 aa, Artificial Sequence
  Designed; as detailed elsewhere in present application
MAVTALAARTWLGVWGVRTMQARGFEEEIVH

SEQ ID NO: 1054 - protein, 31 aa, Artificial Sequence
  Designed; as detailed elsewhere in present application
MAVTALAARTWLGVWGVRTMQARGFEEIVHH

SEQ ID NO: 1055 - protein, 31 aa, Artificial Sequence
  Designed; as detailed elsewhere in present application
MAVTALAARTWLGVWGVRTMQARGFEIVHHK

SEQ ID NO: 1056 - protein, 31 aa, Artificial Sequence
  Designed; as detailed elsewhere in present application
MAVTALAARTWLGVWGVRTMQARGFIVHHKK

SEQ ID NO: 1057 - protein, 32 aa, Artificial Sequence; identical to SEQ ID NO: 913
  Designed; as detailed elsewhere in present application

SEQ ID NO: 1058 - protein, 32 aa, Artificial Sequence
  Designed; as detailed elsewhere in present application
MAVTALAARTWLGVWGVRTMQARGFHEEEIVH

SEQ ID NO: 1059 - protein, 32 aa, Artificial Sequence
  Designed; as detailed elsewhere in present application
MAVTALAARTWLGVWGVRTMQARGFEEEIVHH

SEQ ID NO: 1060 - protein, 32 aa, Artificial Sequence
  Designed; as detailed elsewhere in present application
MAVTALAARTWLGVWGVRTMQARGFEEIVHHK

SEQ ID NO: 1061 - protein, 32 aa, Artificial Sequence
  Designed; as detailed elsewhere in present application
MAVTALAARTWLGVWGVRTMQARGFEIVHHKK

SEQ ID NO: 1062 - protein, 33 aa, Artificial Sequence; identical to SEQ ID NO: 914
  Designed; as detailed elsewhere in present application

SEQ ID NO: 1063 - protein, 33 aa, Artificial Sequence
  Designed; as detailed elsewhere in present application
MAVTALAARTWLGVWGVRTMQARGFHEEEIVHH

SEQ ID NO: 1064 - protein, 33 aa, Artificial Sequence
  Designed; as detailed elsewhere in present application
MAVTALAARTWLGVWGVRTMQARGFEEEIVHHK

SEQ ID NO: 1065 - protein, 33 aa, Artificial Sequence
  Designed; as detailed elsewhere in present application
MAVTALAARTWLGVWGVRTMQARGFEEIVHHKK

SEQ ID NO: 1066 - protein, 34 aa, Artificial Sequence; identical to SEQ ID NO: 915
  Designed; as detailed elsewhere in present application

SEQ ID NO: 1067 - protein, 34 aa, Artificial Sequence
  Designed; as detailed elsewhere in present application
MAVTALAARTWLGVWGVRTMQARGFHEEEIVHHK

SEQ ID NO: 1068 - protein, 34 aa, Artificial Sequence
  Designed; as detailed elsewhere in present application
MAVTALAARTWLGVWGVRTMQARGFEEEIVHHKK

SEQ ID NO: 1069 - protein, 35 aa, Artificial Sequence; identical to SEQ ID NO: 916
  Designed; as detailed elsewhere in present application

SEQ ID NO: 1070 - protein, 35 aa, Artificial Sequence
  Designed; as detailed elsewhere in present application
MAVTALAARTWLGVWGVRTMQARGFHEEEIVHHKK

SEQ ID NO: 1071 - protein, 36 aa, Artificial Sequence; identical to SEQ ID NO: 917
  Designed; as detailed elsewhere in present application

SEQ ID NO: 1072 - protein, 39 aa, Artificial Sequence; identical to SEQ ID NO: 936
  Designed; as detailed elsewhere in present application

SEQ ID NO: 1073 - protein, 39 aa, Artificial Sequence
  Designed; as detailed elsewhere in present application
YGRKKRRQRRRGMAVTALAARTWLGVWGVRTMQARGFHE

SEQ ID NO: 1074 - protein, 39 aa, Artificial Sequence
  Designed; as detailed elsewhere in present application
YGRKKRRQRRRGMAVTALAARTWLGVWGVRTMQARGFEE

SEQ ID NO: 1075 - protein, 39 aa, Artificial Sequence; identical to SEQ ID NO: 1074
  Designed; as detailed elsewhere in present application

SEQ ID NO: 1076 - protein, 39 aa, Artificial Sequence
  Designed; as detailed elsewhere in present application
YGRKKRRQRRRGMAVTALAARTWLGVWGVRTMQARGFEI

SEQ ID NO: 1077 - protein, 39 aa, Artificial Sequence
  Designed; as detailed elsewhere in present application
YGRKKRRQRRRGMAVTALAARTWLGVWGVRTMQARGFIV

SEQ ID NO: 1078 - protein, 39 aa, Artificial Sequence
  Designed; as detailed elsewhere in present application
YGRKKRRQRRRGMAVTALAARTWLGVWGVRTMQARGFVH

SEQ ID NO: 1079 - protein, 39 aa, Artificial Sequence; identical to SEQ ID NO: 936
  Designed; as detailed elsewhere in present application

SEQ ID NO: 1080 - protein, 39 aa, Artificial Sequence
  Designed; as detailed elsewhere in present application
YGRKKRRQRRRGMAVTALAARTWLGVWGVRTMQARGFHK

SEQ ID NO: 1081 - protein, 39 aa, Artificial Sequence
  Designed; as detailed elsewhere in present application
YGRKKRRQRRRGMAVTALAARTWLGVWGVRTMQARGFKK

SEQ ID NO: 1082 - protein, 40 aa, Artificial Sequence; identical to SEQ ID NO: 937
  Designed; as detailed elsewhere in present application

SEQ ID NO: 1083 - protein, 40 aa, Artificial Sequence
  Designed; as detailed elsewhere in present application
YGRKKRRQRRRGMAVTALAARTWLGVWGVRTMQARGFHEE

SEQ ID NO: 1084 - protein, 40 aa, Artificial Sequence
  Designed; as detailed elsewhere in present application
YGRKKRRQRRRGMAVTALAARTWLGVWGVRTMQARGFEEE

SEQ ID NO: 1085 - protein, 40 aa, Artificial Sequence
  Designed; as detailed elsewhere in present application
YGRKKRRQRRRGMAVTALAARTWLGVWGVRTMQARGFEEI

SEQ ID NO: 1086 - protein, 40 aa, Artificial Sequence
  Designed; as detailed elsewhere in present application
YGRKKRRQRRRGMAVTALAARTWLGVWGVRTMQARGFEIV

SEQ ID NO: 1087 - protein, 40 aa, Artificial Sequence
  Designed; as detailed elsewhere in present application
YGRKKRRQRRRGMAVTALAARTWLGVWGVRTMQARGFIVH

SEQ ID NO: 1088 - protein, 40 aa, Artificial Sequence
  Designed; as detailed elsewhere in present application
YGRKKRRQRRRGMAVTALAARTWLGVWGVRTMQARGFVHH

SEQ ID NO: 1089 - protein, 40 aa, Artificial Sequence
  Designed; as detailed elsewhere in present application
YGRKKRRQRRRGMAVTALAARTWLGVWGVRTMQARGFHHK

SEQ ID NO: 1090 - protein, 40 aa, Artificial Sequence
  Designed; as detailed elsewhere in present application
YGRKKRRQRRRGMAVTALAARTWLGVWGVRTMQARGFHKK

SEQ ID NO: 1091 - protein, 41 aa, Artificial Sequence; identical to SEQ ID NO: 938
  Designed; as detailed elsewhere in present application

SEQ ID NO: 1092 - protein, 41 aa, Artificial Sequence
  Designed; as detailed elsewhere in present application
YGRKKRRQRRRGMAVTALAARTWLGVWGVRTMQARGFHEEE

SEQ ID NO: 1093 - protein, 41 aa, Artificial Sequence
  Designed; as detailed elsewhere in present application
YGRKKRRQRRRGMAVTALAARTWLGVWGVRTMQARGFEEEI

SEQ ID NO: 1094 - protein, 41 aa, Artificial Sequence
  Designed; as detailed elsewhere in present application
YGRKKRRQRRRGMAVTALAARTWLGVWGVRTMQARGFEEIV

SEQ ID NO: 1095 - protein, 41 aa, Artificial Sequence
  Designed; as detailed elsewhere in present application
YGRKKRRQRRRGMAVTALAARTWLGVWGVRTMQARGFEIVH

SEQ ID NO: 1096 - protein, 41 aa, Artificial Sequence
  Designed; as detailed elsewhere in present application
YGRKKRRQRRRGMAVTALAARTWLGVWGVRTMQARGFIVHH

SEQ ID NO: 1097 - protein, 41 aa, Artificial Sequence
  Designed; as detailed elsewhere in present application
YGRKKRRQRRRGMAVTALAARTWLGVWGVRTMQARGFVHHK

SEQ ID NO: 1098 - protein, 41 aa, Artificial Sequence
  Designed; as detailed elsewhere in present application
YGRKKRRQRRRGMAVTALAARTWLGVWGVRTMQARGFHHKK

SEQ ID NO: 1099 - protein, 42 aa, Artificial Sequence; identical to SEQ ID NO: 939
  Designed; as detailed elsewhere in present application

SEQ ID NO: 1100 - protein, 42 aa, Artificial Sequence
  Designed; as detailed elsewhere in present application
YGRKKRRQRRRGMAVTALAARTWLGVWGVRTMQARGFHEEEI

SEQ ID NO: 1101 - protein, 42 aa, Artificial Sequence
  Designed; as detailed elsewhere in present application
YGRKKRRQRRRGMAVTALAARTWLGVWGVRTMQARGFEEEIV

SEQ ID NO: 1102 - protein, 42 aa, Artificial Sequence
  Designed; as detailed elsewhere in present application
YGRKKRRQRRRGMAVTALAARTWLGVWGVRTMQARGFEEIVH

SEQ ID NO: 1103 - protein, 42 aa, Artificial Sequence
  Designed; as detailed elsewhere in present application
YGRKKRRQRRRGMAVTALAARTWLGVWGVRTMQARGFEIVHH

SEQ ID NO: 1104 - protein, 42 aa, Artificial Sequence
  Designed; as detailed elsewhere in present application
YGRKKRRQRRRGMAVTALAARTWLGVWGVRTMQARGFIVHHK

SEQ ID NO: 1105 - protein, 42 aa, Artificial Sequence
  Designed; as detailed elsewhere in present application
YGRKKRRQRRRGMAVTALAARTWLGVWGVRTMQARGFVHHKK

SEQ ID NO: 1106 - protein, 43 aa, Artificial Sequence; identical to SEQ ID NO: 940
  Designed; as detailed elsewhere in present application

SEQ ID NO: 1107 - protein, 43 aa, Artificial Sequence
  Designed; as detailed elsewhere in present application
YGRKKRRQRRRGMAVTALAARTWLGVWGVRTMQARGFHEEEIV

SEQ ID NO: 1108 - protein, 43 aa, Artificial Sequence
  Designed; as detailed elsewhere in present application
YGRKKRRQRRRGMAVTALAARTWLGVWGVRTMQARGFEEEIVH

SEQ ID NO: 1109 - protein, 43 aa, Artificial Sequence
  Designed; as detailed elsewhere in present application
YGRKKRRQRRRGMAVTALAARTWLGVWGVRTMQARGFEEIVHH

SEQ ID NO: 1110 - protein, 43 aa, Artificial Sequence
  Designed; as detailed elsewhere in present application
YGRKKRRQRRRGMAVTALAARTWLGVWGVRTMQARGFEIVHHK

SEQ ID NO: 1111 - protein, 43 aa, Artificial Sequence
  Designed; as detailed elsewhere in present application
YGRKKRRQRRRGMAVTALAARTWLGVWGVRTMQARGFIVHHKK

SEQ ID NO: 1112 - protein, 44 aa, Artificial Sequence; identical to SEQ ID NO: 941
  Designed; as detailed elsewhere in present application

SEQ ID NO: 1113 - protein, 44 aa, Artificial Sequence
  Designed; as detailed elsewhere in present application
YGRKKRRQRRRGMAVTALAARTWLGVWGVRTMQARGFHEEEIVH

SEQ ID NO: 1114 - protein, 44 aa, Artificial Sequence
  Designed; as detailed elsewhere in present application
YGRKKRRQRRRGMAVTALAARTWLGVWGVRTMQARGFEEEIVHH

SEQ ID NO: 1115 - protein, 44 aa, Artificial Sequence
  Designed; as detailed elsewhere in present application
YGRKKRRQRRRGMAVTALAARTWLGVWGVRTMQARGFEEIVHHK

SEQ ID NO: 1116 - protein, 44 aa, Artificial Sequence
  Designed; as detailed elsewhere in present application
YGRKKRRQRRRGMAVTALAARTWLGVWGVRTMQARGFEIVHHKK

SEQ ID NO: 1117 - protein, 45 aa, Artificial Sequence; identical to SEQ ID NO: 942
  Designed; as detailed elsewhere in present application

SEQ ID NO: 1118 - protein, 45 aa, Artificial Sequence
  Designed; as detailed elsewhere in present application
YGRKKRRQRRRGMAVTALAARTWLGVWGVRTMQARGFHEEEIVHH

SEQ ID NO: 1119 - protein, 45 aa, Artificial Sequence
  Designed; as detailed elsewhere in present application
YGRKKRRQRRRGMAVTALAARTWLGVWGVRTMQARGFEEEIVHHK

SEQ ID NO: 1120 - protein, 45 aa, Artificial Sequence
  Designed; as detailed elsewhere in present application
YGRKKRRQRRRGMAVTALAARTWLGVWGVRTMQARGFEEIVHHKK

SEQ ID NO: 1121 - protein, 46 aa, Artificial Sequence; identical to SEQ ID NO: 943
  Designed; as detailed elsewhere in present application

SEQ ID NO: 1122 - protein, 46 aa, Artificial Sequence
  Designed; as detailed elsewhere in present application
YGRKKRRQRRRGMAVTALAARTWLGVWGVRTMQARGFHEEEIVHHK

SEQ ID NO: 1123 - protein, 46 aa, Artificial Sequence
  Designed; as detailed elsewhere in present application
YGRKKRRQRRRGMAVTALAARTWLGVWGVRTMQARGFEEEIVHHKK

SEQ ID NO: 1124 - protein, 47 aa, Artificial Sequence; identical to SEQ ID NO: 944
  Designed; as detailed elsewhere in present application

SEQ ID NO: 1125 - protein, 47 aa, Artificial Sequence
  Designed; as detailed elsewhere in present application
YGRKKRRQRRRGMAVTALAARTWLGVWGVRTMQARGFHEEEIVHHKK

SEQ ID NO: 1126 - protein, 48 aa, Artificial Sequence; identical to SEQ ID NO: 945
  Designed; as detailed elsewhere in present application

SEQ ID NO: 1127 - protein, 106 aa, Homo sapiens; identical to SEQ ID NO: 639

SEQ ID NO: 1128 - protein, 107 aa, Balaena mysticetus; identical to SEQ ID NO: 12

SEQ ID NO: 1129 - protein, 107 aa, Balaenoptera physalus
MAATALAARTRFGVWSVWAMQGRGFGSESADNLGSSAGAVRDAGGAFGKKEQAEEERYFRARAKEQLAALKKHHENEISHHVKEIEHLQKEIERHKQSIKKLKHDDD

SEQ ID NO: 1130 - protein, 107 aa, Balaenoptera musculus; identical to SEQ ID NO: 337

SEQ ID NO: 1131 - protein, 107 aa, Megaptera novaeangliae
MAATALAARTRFGVWSVWAMQGRGFGSESADNLRSSAGAVRDAGGAFGKKEQAEEERYFRARAKEQLAALKKHHENEISHHEKEIEHLQKEIERHKQSIKKLKHDDD

SEQ ID NO: 1132 - protein, 107 aa, Orcinus orca
MAATALAARTRFGVWSVWAMQGRGFGSESADNLGSTAGAVRDAGGAFGKKEQAEEERYFRARAKEQLAALKKHHENEISHHMKEIEHLQKEIERHKQSIKKLKHDDD

SEQ ID NO: 1133 - protein, 107 aa, Physeter catodon; identical to SEQ ID NO: 653

SEQ ID NO: 1134 - protein, 85 aa, Eschrichtius robustus
MQGSEPADNLGSSEATVWNAGVDFRKREQAKGQRYLRACAKEQLAALKKHHENEISHHVKEIECLQKEMEEHKQLVKKLKHHDDD

SEQ ID NO: 1135 - protein, 107 aa, Ziphius cavirostris
MAATALAARTRFGVWSVWAMQGRGFGSESADNLGSSAGAIRDAGGAFGKREQAEEERYFRARAKEQLAALKKHHENEISHHVKEIEHLQKEIERHKQSIKKLKQDDD

SEQ ID NO: 1136 - protein, 107 aa, Globicephala melas; identical to SEQ ID NO: 656

SEQ ID NO: 1137 - protein, 107 aa, Balaenoptera acutorostrata; identical to SEQ ID NO: 657

SEQ ID NO: 1138 - protein, 107 aa, Monodon monoceros
MAATALAARTRFGVWSVWAMQGRGFGSESADNLGSSAGAVRDAGGAFGKREQAEEERYFRARAKEQLAALKKHHENEISHHMKEIEHLQKEIERHKQSIKKLKHNDD

SEQ ID NO: 1139 - protein, 107 aa, Delphinapterus leucas; identical to SEQ ID NO: 651

SEQ ID NO: 1140 - protein, 107 aa, Tursiops truncatus; identical to SEQ ID NO: 656

SEQ ID NO: 1141 - protein, 107 aa, Lipotes vexillifer
MAATALAARTRFGVWSVWAMQGRGFGSESADNLGSSAGAVRDAGGAFGKREQAEEERYFRARAKEQLTALKKHHENEISHHMKEIEHLQKEIERHKQSIKKLKHDDD

SEQ ID NO: 1142 - protein, 113 aa, Chelonoidis abingdonii
MAVAGLRGGLRAALGMQQRGWSSGSDQLGELGSGAGKGGGGGGSIREAGGAFGKRQAAHEERYFREKEREQLASLREYHEEEIDHHKKEIQRLQKEIDRHKNKIKKLKGDDDD

SEQ ID NO: 1143 - protein, 114 aa, Terrapene carolina triunguis
MAAAGLRGGLRGALVMQQRGWSSGSGSDQLGELGSGAGKGGGGGGSIREAGGAFGKRQAAHEERYFRDKEREQLASLREHHEEEIDHHKKEIQRLQKEIDRHKNKIKKLKGDDD

SEQ ID NO: 1144 - protein, 115 aa, Chelonia mydas
MAAAGLRGGLRGALALQQRGWSSGSGSGSDQLGELGSGAGKGGGGGGSIREAGGAFGKRQAAHEERYFREKEAEQLASLRKHHEEEIDHHKKEIERLQKEIERHKYKIKKLKNDD

SEQ ID NO: 1145 - protein, 115 aa, Chrysemys picta
MAAAGLRGGLRGALVMQQRGWSSGSGSDQLGELGSGAGKGGGGGGSIREAGGAFGKRQAAHEERYFRDKEREQLASLREHHEEEIDHHKKEIQRLQKEIERHKIKIKKLKGDDDD

SEQ ID NO: 1146 - protein, 114 aa, Trachemys scripta
MAAAGLRGGLRGALVMQQRGWSSGSGSDQLGELGSGAGKGGGGGGSIREAGGAFGKRQAAHEERYFRDKEREQLASLREHHEEEIDHHKKEIQRLQKEIERHKIKIKKLKGDDD

SEQ ID NO: 1147 - protein, 117 aa, Alligator mississippiensis; identical to SEQ ID NO: 668

SEQ ID NO: 1148 - protein, 115 aa, Varanus komodoensis
MAAVGAALRSGLRGAVAFPSQQRAWSSGSDQLGELGKGAGKGGGGGGTIREAGGAFGKRQVAEEERYFREAEREKLANLRKHHEEEIYHHKKEIERLQKEIERHKSKIKKLGDDD

SEQ ID NO: 1149 - protein, 117 aa, Crocodylus porosus
MAAGVLRGGLRGAFLMQQQRGWSSGSGSGADQLGELGKGAGKGGGGGGSIREAGGAFGKRQAAEEERYFREREREQLAALRKHHEEEIDHHKKQIEVLQKEIERHKYKIKKLKNDDD

SEQ ID NO: 1150 - protein, 114 aa, Strigops habroptilus
MAAAAAARGGLRGALVLQQQRWSSGSGADQLGELGKGAGKGGGGGGAIREAGGAFGKKQAAEEERYFREKEREQLSALRKHHEEEIDHHQKEIERLQKEIERHKYKIKKLKDDN

SEQ ID NO: 1151 - protein, 108 aa, Anoplopoma fimbria
MSRFLLRADIRRCVASQIRMASDQLGELGKGAGKGGGGGGSVRSAGGAFGKREVAEEERYFRQKEKEQMEALRKHHVEEIEHHKKEIERLQKEIDRHKGKIRKLNHDD

SEQ ID NO: 1152 - protein, 107 aa, Anguilla anguilla; identical to SEQ ID NO: 675

SEQ ID NO: 1153 - protein, 106 aa, Trichechus manatus; identical to SEQ ID NO: 644

SEQ ID NO: 1154 - protein, 106 aa, Loxodonta africana; identical to SEQ ID NO: 652

SEQ ID NO: 1155 - protein, 106 aa, Gorilla gorilla; identical to SEQ ID NO: 641

SEQ ID NO: 1156 - protein, 106 aa, Cebus capucinus
MAVTALAARTWLGVWGVRTMQARSFGSDQSENLDRGAGSIREAGGAFGKREQAEEERYFRAQTREQLAALKKHHEEEIVHHKKEIERLQKEIERHKQKIKILKHDD

SEQ ID NO: 1157 - protein, 106 aa, Saimiri boliviensis
MAVTALAARTWLGVWGVRTMQARSFGSDQSENLDRGAGSIREAGGAFGKREQAEEERYFRAQTREQLAALKKHHEDEIVHHKKEIERLQKEIERHKQKIKILKHDD

SEQ ID NO: 1158 - protein, 106 aa, Callithrix jacchus
MAVTALAARTWLGVWGVRTMQARSFGSDQSENLDRGAGSIREAGGAFGKREQAEEERYFRAQAREQLAALKKHHEDEIVHHKKEIERLQKEIERHKQKIKILKDDD

SEQ ID NO: 1159 - protein, 106 aa, Carlito syrichta
MAVSALVARTWLGMWGVRARQTRGFGSDQSENVDRSSGSIREAGGAFGKREQAEEERYFRAQTREQLAALKKHHEDEIGHHKKEIERLQKEIERHKQKIKTLKHDD

SEQ ID NO: 1160 - protein, 104 aa, Heterocephalus glaber; identical to SEQ ID NO: 662

SEQ ID NO: 1161 - protein, 104 aa, Cryptomys damarensis
MAGTALASRARLGVRGVRAMQTRGFSSDKDHESSAGSIRDAGGAFGKREQAEEERFFRQKTKEQLDALKKHHEDEIYHHKKAIEQMEKEIERHKQKIKQLKHHE

SEQ ID NO: 1162 - protein, 106 aa, Mus musculus; identical to SEQ ID NO: 663

SEQ ID NO: 1163 - protein, 106 aa, Artificial Sequence; identical to SEQ ID NO: 782
  Designed; as detailed elsewhere in present application

SEQ ID NO: 1164 - protein, 107 aa, Artificial Sequence
  Designed; as detailed elsewhere in present application
MAATALAARTRFGVWSVWAMQGRGFGSESADNLGSSAGAIRDAGGAFGKKEQAEEERYFRARAKEQLAALKKHKENEISHHVKEIEHLQKEIERHKQSIKKLKHDDD

SEQ ID NO: 1165 - protein, 107 aa, Artificial Sequence
  Designed; as detailed elsewhere in present application
MAATALAARTRFGVWSVWAMQGRGFGSESADNLGSSAGAVRDAGGAFGKKEQAEEERYFRARAKEQLAALKKHKENEISHHVKEIEHLQKEIERHKQSIKKLKHDDD

SEQ ID NO: 1166 - protein, 107 aa, Artificial Sequence
  Designed; as detailed elsewhere in present application
MAAVELVAWMQLRVWSVWVMQGLGFGSEPADNLGSSEAAVWNAGVDFRKREQAKGERYLRARAKEQLAALKKHKENEISHHVKEIEHLQKEIERHKQSIKKLKHDDD

SEQ ID NO: 1167 - protein, 107 aa, Artificial Sequence
  Designed; as detailed elsewhere in present application
MAATALAARTRFGVWSVWAMQGRGFGSESADNLRSSAGAVRDAGGAFGKKEQAEEERYFRARAKEQLAALKKHKENEISHHEKEIEHLQKEIERHKQSIKKLKHDDD

SEQ ID NO: 1168 - protein, 107 aa, Artificial Sequence
  Designed; as detailed elsewhere in present application
MAATALAARTRFGVWSVWAMQGRGFGSESADNLGSTAGAVRDAGGAFGKKEQAEEERYFRARAKEQLAALKKHKENEISHHMKEIEHLQKEIERHKQSIKKLKHDDD

SEQ ID NO: 1169 - protein, 107 aa, Artificial Sequence; identical to SEQ ID NO: 756
  Designed; as detailed elsewhere in present application

SEQ ID NO: 1170 - protein, 85 aa, Artificial Sequence
  Designed; as detailed elsewhere in present application
MQGSEPADNLGSSEAAVWNAGVDFRKREQAKGQRYLRACAKEQLAALKKHKENEISHHVKEIECLQKEMEEHKQLVKKLKHHDDD

SEQ ID NO: 1171 - protein, 107 aa, Artificial Sequence
  Designed; as detailed elsewhere in present application
MAATALAARTRFGVWSVWAMQGRGFGSESADNLGSSAGAIRDAGGAFGKREQAEEERYFRARAKEQLAALKKHKENEISHHVKEIEHLQKEIERHKQSIKKLKQDDD

SEQ ID NO: 1172 - protein, 107 aa, Artificial Sequence; identical to SEQ ID NO: 763
  Designed; as detailed elsewhere in present application

SEQ ID NO: 1173 - protein, 107 aa, Artificial Sequence; identical to SEQ ID NO: 764
  Designed; as detailed elsewhere in present application

SEQ ID NO: 1174 - protein, 107 aa, Artificial Sequence
  Designed; as detailed elsewhere in present application
MAATALAARTRFGVWSVWAMQGRGFGSESADNLGSSAGAVRDAGGAFGKREQAEEERYFRARAKEQLAALKKHKENEISHHMKEIEHLQKEIERHKQSIKKLKHNDD

SEQ ID NO: 1175 - protein, 107 aa, Artificial Sequence; identical to SEQ ID NO: 753
  Designed; as detailed elsewhere in present application

SEQ ID NO: 1176 - protein, 107 aa, Artificial Sequence; identical to SEQ ID NO: 763
  Designed; as detailed elsewhere in present application

SEQ ID NO: 1177 - protein, 107 aa, Artificial Sequence; identical to SEQ ID NO: 759
  Designed; as detailed elsewhere in present application

SEQ ID NO: 1178 - protein, 113 aa, Artificial Sequence
  Designed; as detailed elsewhere in present application
MAVAGLRGGLRAALGMQQRGWSSGSDQLGELGSGAGKGGGGGGAIREAGGAFGKRQAAHEERYFREKEREQLASLREYKEEEIDHHKKEIQRLQKEIDRHKNKIKKLKGDDDD

SEQ ID NO: 1179 - protein, 114 aa, Artificial Sequence
  Designed; as detailed elsewhere in present application
MAAAGLRGGLRGALVMQQRGWSSGSGSDQLGELGSGAGKGGGGGGAIREAGGAFGKRQAAHEERYFRDKEREQLASLREHKEEEIDHHKKEIQRLQKEIDRHKNKIKKLKGDDD

SEQ ID NO: 1180 - protein, 115 aa, Artificial Sequence
  Designed; as detailed elsewhere in present application
MAAAGLRGGLRGALALQQRGWSSGSGSGSDQLGELGSGAGKGGGGGGAIREAGGAFGKRQAAHEERYFREKEAEQLASLRKHKEEEIDHHKKEIERLQKEIERHKYKIKKLKNDD

SEQ ID NO: 1181 - protein, 115 aa, Artificial Sequence
  Designed; as detailed elsewhere in present application
MAAAGLRGGLRGALVMQQRGWSSGSGSDQLGELGSGAGKGGGGGGAIREAGGAFGKRQAAHEERYFRDKEREQLASLREHKEEEIDHHKKEIQRLQKEIERHKIKIKKLKGDDDD

SEQ ID NO: 1182 - protein, 114 aa, Artificial Sequence
  Designed; as detailed elsewhere in present application
MAAAGLRGGLRGALVMQQRGWSSGSGSDQLGELGSGAGKGGGGGGAIREAGGAFGKRQAAHEERYFRDKEREQLASLREHKEEEIDHHKKEIQRLQKEIERHKIKIKKLKGDDD

SEQ ID NO: 1183 - protein, 117 aa, Artificial Sequence
  Designed; as detailed elsewhere in present application
MAAGVLRSGLRGAFLMQQQRGWSSGSGADQLGELGKGAGKGGGGGGAIREAGGAFGKRQAAEEERYFREKEREQLAALRKHKEEEIDHHKKQIDLLQKEIERHKYKIKKLKNDDDDD

SEQ ID NO: 1184 - protein, 115 aa, Artificial Sequence
  Designed; as detailed elsewhere in present application
MAAVGAALRSGLRGAVAFPSQQRAWSSGSDQLGELGKGAGKGGGGGGAIREAGGAFGKRQVAEEERYFREAEREKLANLRKHKEEEIYHHKKEIERLQKEIERHKSKIKKLGDDD

SEQ ID NO: 1185 - protein, 117 aa, Artificial Sequence
  Designed; as detailed elsewhere in present application
MAAGVLRGGLRGAFLMQQQRGWSSGSGSGADQLGELGKGAGKGGGGGGAIREAGGAFGKRQAAEEERYFREREREQLAALRKHKEEEIDHHKKQIEVLQKEIERHKYKIKKLKNDDD

SEQ ID NO: 1186 - protein, 114 aa, Artificial Sequence
  Designed; as detailed elsewhere in present application
MAAAAAARGGLRGALVLQQQRWSSGSGADQLGELGKGAGKGGGGGGAIREAGGAFGKKQAAEEERYFREKEREQLSALRKHKEEEIDHHQKEIERLQKEIERHKYKIKKLKDDN

SEQ ID NO: 1187 - protein, 108 aa, Artificial Sequence
  Designed; as detailed elsewhere in present application
MSRFLLRADIRRCVASQIRMASDQLGELGKGAGKGGGGGGAVRSAGGAFGKREVAEEERYFRQKEKEQMEALRKHKVEEIEHHKKEIERLQKEIDRHKGKIRKLNHDD

SEQ ID NO: 1188 - protein, 107 aa, Artificial Sequence
  Designed; as detailed elsewhere in present application
MSRLLKSNLRGFLITQIRMSSDQLGELGKGAGKGGGGGGAVREAGGALGKRQAAEEERYFKRKEQEQLAALRRHKEEEIDHHKKEIERLQREIDRHKGKIRKLKHDD

SEQ ID NO: 1189 - protein, 106 aa, Artificial Sequence
  Designed; as detailed elsewhere in present application
MAVTALAARVRLYSLGARAMQAQGFSSDQSEDLDRRAGAIREAGGAFAKREAAEEERYFRAQAKEQLAALKKYKEEEIVHSKKEIERLQKEIERHKQKIKKLKHDD

SEQ ID NO: 1190 - protein, 106 aa, Artificial Sequence; identical to SEQ ID NO: 755
  Designed; as detailed elsewhere in present application

SEQ ID NO: 1191 - protein, 106 aa, Artificial Sequence; identical to SEQ ID NO: 803
  Designed; as detailed elsewhere in present application

SEQ ID NO: 1192 - protein, 106 aa, Artificial Sequence; identical to SEQ ID NO: 813
  Designed; as detailed elsewhere in present application

SEQ ID NO: 1193 - protein, 106 aa, Artificial Sequence; identical to SEQ ID NO: 814
  Designed; as detailed elsewhere in present application

SEQ ID NO: 1194 - protein, 106 aa, Artificial Sequence
  Designed; as detailed elsewhere in present application
MAVTALAARTWLGVWGVRTMQARSFGSDQSENLDRGAGAIREAGGAFGKREQAEEERYFRAQAREQLAALKKHKEDEIVHHKKEIERLQKEIERHKQKIKILKDDD

SEQ ID NO: 1195 - protein, 106 aa, Artificial Sequence
  Designed; as detailed elsewhere in present application
MAVSALVARTWLGMWGVRARQTRGFGSDQSENVDRSSGAIREAGGAFGKREQAEEERYFRAQTREQLAALKKHKEDEIGHHKKEIERLQKEIERHKQKIKTLKHDD

SEQ ID NO: 1196 - protein, 104 aa, Artificial Sequence; identical to SEQ ID NO: 791
  Designed; as detailed elsewhere in present application

SEQ ID NO: 1197 - protein, 104 aa, Artificial Sequence
  Designed; as detailed elsewhere in present application
MAGTALASRARLGVRGVRAMQTRGFSSDKDHESSAGAIRDAGGAFGKREQAEEERFFRQKTKEQLDALKKHKEDEIYHHKKAIEQMEKEIERHKQKIKQLKHHE

SEQ ID NO: 1198 - protein, 106 aa, Artificial Sequence; identical to SEQ ID NO: 784
  Designed; as detailed elsewhere in present application

SEQ ID NO: 1199 - protein, 107 aa, Balaena mysticetus; identical to SEQ ID NO: 12

SEQ ID NO: 1200 - protein, 107 aa, Artificial Sequence; identical to SEQ ID NO: 1164
  Designed; as detailed elsewhere in present application

SEQ ID NO: 1201 - protein, 107 aa, Artificial Sequence
  Designed; as detailed elsewhere in present application
MAATALAARTRFGVWSVWAMQGRGFGSESADNLGSSAGAIRDAGGAFGKKAQAEEERYFRARAKEQLAALKKHKENEISHHVKEIEHLQKEIERHKQSIKKLKHDDD

SEQ ID NO: 1202 - protein, 107 aa, Artificial Sequence
  Designed; as detailed elsewhere in present application
MAATALAARTRFGVWSVWAMQGRGFGSESADNLGSSAGAIRDAGGAFGKKQQAEEERYFRARAKEQLAALKKHKENEISHHVKEIEHLQKEIERHKQSIKKLKHDDD

SEQ ID NO: 1203 - protein, 107 aa, Artificial Sequence
  Designed; as detailed elsewhere in present application
MAATALAARTRFGVWSVWAMQGRGFGSESADNLGSSAGAIRDAGGAFGKKEQAEEERYFRARAKEQLAALKKAKENEISHHVKEIEHLQKEIERHKQSIKKLKHDDD

SEQ ID NO: 1204 - protein, 107 aa, Artificial Sequence
  Designed; as detailed elsewhere in present application
MAATALAARTRFGVWSVWAMQGRGFGSESADNLGSSAGAIRDAGGAFGKKEQAEEERYFRARAKEQLAALKKHKENEISAHVKEIEHLQKEIERHKQSIKKLKHDDD

SEQ ID NO: 1205 - protein, 107 aa, Artificial Sequence
  Designed; as detailed elsewhere in present application
MAATALAARTRFGVWSVWAMQGRGFGSESADNLGSSAGAIRDAGGAFGKKAQAEEERYFRARAKEQLAALKKAKENEISHHVKEIEHLQKEIERHKQSIKKLKHDDD

SEQ ID NO: 1206 - protein, 107 aa, Artificial Sequence
  Designed; as detailed elsewhere in present application
MAATALAARTRFGVWSVWAMQGRGFGSESADNLGSSAGAIRDAGGAFGKKAQAEEERYFRARAKEQLAALKKHKENEISAHVKEIEHLQKEIERHKQSIKKLKHDDD

SEQ ID NO: 1207 - protein, 107 aa, Artificial Sequence
  Designed; as detailed elsewhere in present application
MAATALAARTRFGVWSVWAMQGRGFGSESADNLGSSAGAIRDAGGAFGKKEQAEEERYFRARAKEQLAALKKAKENEISAHVKEIEHLQKEIERHKQSIKKLKHDDD

SEQ ID NO: 1208 - protein, 107 aa, Artificial Sequence
  Designed; as detailed elsewhere in present application
MAATALAARTRFGVWSVWAMQGRGFGSESADNLGSSAGAIRDAGGAFGKKAQAEEERYFRARAKEQLAALKKAKENEISAHVKEIEHLQKEIERHKQSIKKLKHDDD

SEQ ID NO: 1209 - protein, 108 aa, Artificial Sequence
  Designed; as detailed elsewhere in present application
MAATALAARTRFGVWSVWAMQGRGFGSESADNLGSSAGAIRDAGGAFGKKEQAEEERYFRARAKEQLAALKKHKENEISHHVKEIEHLQKEIERHKQSIKKLKHDDDD

SEQ ID NO: 1210 - protein, 108 aa, Artificial Sequence
  Designed; as detailed elsewhere in present application
MAATALAARTRFGVWSVWAMQGRGFGSESADNLGSSAGAIRDAGGAFGKKAQAEEERYFRARAKEQLAALKKHKENEISHHVKEIEHLQKEIERHKQSIKKLKHDDDD

SEQ ID NO: 1211 - protein, 108 aa, Artificial Sequence
  Designed; as detailed elsewhere in present application
MAATALAARTRFGVWSVWAMQGRGFGSESADNLGSSAGAIRDAGGAFGKKQQAEEERYFRARAKEQLAALKKHKENEISHHVKEIEHLQKEIERHKQSIKKLKHDDDD

SEQ ID NO: 1212 - protein, 108 aa, Artificial Sequence
  Designed; as detailed elsewhere in present application
MAATALAARTRFGVWSVWAMQGRGFGSESADNLGSSAGAIRDAGGAFGKKEQAEEERYFRARAKEQLAALKKAKENEISHHVKEIEHLQKEIERHKQSIKKLKHDDDD

SEQ ID NO: 1213 - protein, 108 aa, Artificial Sequence
  Designed; as detailed elsewhere in present application
MAATALAARTRFGVWSVWAMQGRGFGSESADNLGSSAGAIRDAGGAFGKKEQAEEERYFRARAKEQLAALKKHKENEISAHVKEIEHLQKEIERHKQSIKKLKHDDDD

SEQ ID NO: 1214 - protein, 108 aa, Artificial Sequence
  Designed; as detailed elsewhere in present application
MAATALAARTRFGVWSVWAMQGRGFGSESADNLGSSAGAIRDAGGAFGKKAQAEEERYFRARAKEQLAALKKAKENEISHHVKEIEHLQKEIERHKQSIKKLKHDDDD

SEQ ID NO: 1215 - protein, 108 aa, Artificial Sequence
  Designed; as detailed elsewhere in present application
MAATALAARTRFGVWSVWAMQGRGFGSESADNLGSSAGAIRDAGGAFGKKAQAEEERYFRARAKEQLAALKKHKENEISAHVKEIEHLQKEIERHKQSIKKLKHDDDD

SEQ ID NO: 1216 - protein, 108 aa, Artificial Sequence
  Designed; as detailed elsewhere in present application
MAATALAARTRFGVWSVWAMQGRGFGSESADNLGSSAGAIRDAGGAFGKKEQAEEERYFRARAKEQLAALKKAKENEISAHVKEIEHLQKEIERHKQSIKKLKHDDDD

SEQ ID NO: 1217 - protein, 108 aa, Artificial Sequence
  Designed; as detailed elsewhere in present application
MAATALAARTRFGVWSVWAMQGRGFGSESADNLGSSAGAIRDAGGAFGKKAQAEEERYFRARAKEQLAALKKAKENEISAHVKEIEHLQKEIERHKQSIKKLKHDDDD

SEQ ID NO: 1218 - protein, 109 aa, Artificial Sequence
  Designed; as detailed elsewhere in present application
MAATALAARTRFGVWSVWAMQGRGFGSESADNLGSSAGAIRDAGGAFGKKEQAEEERYFRARAKEQLAALKKHKENEISHHVKEIEHLQKEIERHKQSIKKLKHDDDDD

SEQ ID NO: 1219 - protein, 109 aa, Artificial Sequence
  Designed; as detailed elsewhere in present application
MAATALAARTRFGVWSVWAMQGRGFGSESADNLGSSAGAIRDAGGAFGKKAQAEEERYFRARAKEQLAALKKHKENEISHHVKEIEHLQKEIERHKQSIKKLKHDDDDD

SEQ ID NO: 1220 - protein, 109 aa, Artificial Sequence
  Designed; as detailed elsewhere in present application
MAATALAARTRFGVWSVWAMQGRGFGSESADNLGSSAGAIRDAGGAFGKKQQAEEERYFRARAKEQLAALKKHKENEISHHVKEIEHLQKEIERHKQSIKKLKHDDDDD

SEQ ID NO: 1221 - protein, 109 aa, Artificial Sequence
  Designed; as detailed elsewhere in present application
MAATALAARTRFGVWSVWAMQGRGFGSESADNLGSSAGAIRDAGGAFGKKEQAEEERYFRARAKEQLAALKKAKENEISHHVKEIEHLQKEIERHKQSIKKLKHDDDDD

SEQ ID NO: 1222 - protein, 109 aa, Artificial Sequence
  Designed; as detailed elsewhere in present application
MAATALAARTRFGVWSVWAMQGRGFGSESADNLGSSAGAIRDAGGAFGKKEQAEEERYFRARAKEQLAALKKHKENEISAHVKEIEHLQKEIERHKQSIKKLKHDDDDD

SEQ ID NO: 1223 - protein, 109 aa, Artificial Sequence
  Designed; as detailed elsewhere in present application
MAATALAARTRFGVWSVWAMQGRGFGSESADNLGSSAGAIRDAGGAFGKKAQAEEERYFRARAKEQLAALKKAKENEISHHVKEIEHLQKEIERHKQSIKKLKHDDDDD

SEQ ID NO: 1224 - protein, 109 aa, Artificial Sequence
  Designed; as detailed elsewhere in present application
MAATALAARTRFGVWSVWAMQGRGFGSESADNLGSSAGAIRDAGGAFGKKAQAEEERYFRARAKEQLAALKKHKENEISAHVKEIEHLQKEIERHKQSIKKLKHDDDDD

SEQ ID NO: 1225 - protein, 109 aa, Artificial Sequence
  Designed; as detailed elsewhere in present application
MAATALAARTRFGVWSVWAMQGRGFGSESADNLGSSAGAIRDAGGAFGKKEQAEEERYFRARAKEQLAALKKAKENEISAHVKEIEHLQKEIERHKQSIKKLKHDDDDD

SEQ ID NO: 1226 - protein, 109 aa, Artificial Sequence
  Designed; as detailed elsewhere in present application
MAATALAARTRFGVWSVWAMQGRGFGSESADNLGSSAGAIRDAGGAFGKKAQAEEERYFRARAKEQLAALKKAKENEISAHVKEIEHLQKEIERHKQSIKKLKHDDDDD

SEQ ID NO: 1227 - protein, 106 aa, Homo sapiens; identical to SEQ ID NO: 639

SEQ ID NO: 1228 - protein, 107 aa, Balaena mysticetus; identical to SEQ ID NO: 12

SEQ ID NO: 1229 - protein, 107 aa, Artificial Sequence
  Designed; as detailed elsewhere in present application
MAVTALAARTWLGVWGVRTMQARGFGSDQSENVDRGAGSIREAGGAFGKREQAEEERYFRAQSREQLAALKKHHEEEIVHHKKEIERLQKEIERHKQKIKMLKHDDD

SEQ ID NO: 1230 - protein, 106 aa, Artificial Sequence
  Designed; as detailed elsewhere in present application
MAVTALAARTWLGVWGVRTMQARGFGSDQSENVDRGAGSIREAGGAFGKREQAEEERYFRAQSREQLAALKKHHEEEIVHHKKEIERLQKEIERHKQKIKKLKHDD

SEQ ID NO: 1231 - protein, 107 aa, Artificial Sequence
  Designed; as detailed elsewhere in present application
MAVTALAARTWLGVWGVRTMQARGFGSDQSENVDRGAGSIREAGGAFGKREQAEEERYFRAQSREQLAALKKHHEEEIVHHKKEIERLQKEIERHKQKIKKLKHDDD

SEQ ID NO: 1232 - protein, 106 aa, Artificial Sequence
  Designed; as detailed elsewhere in present application
MAVTALAARTWLGVWGVRTMQARGFGSDQSENVDRGAGSIREAGGAFGKREQAEEERYFRAQSREQLAALKKHHEEEIVHHKKEIERLQKEIERHKQSIKMLKHDD

SEQ ID NO: 1233 - protein, 106 aa, Artificial Sequence
  Designed; as detailed elsewhere in present application
MAVTALAARTWLGVWGVRTMQARGFGSDQSENVDRGAGSIREAGGAFGKREQAEEERYFRAQSREQLAALKKHHEEEIVHHKKEIEHLQKEIERHKQKIKMLKHDD

SEQ ID NO: 1234 - protein, 106 aa, Artificial Sequence
  Designed; as detailed elsewhere in present application
MAVTALAARTWLGVWGVRTMQARGFGSDQSENVDRGAGSIREAGGAFGKREQAEEERYFRAQSREQLAALKKHHEEEIVHHVKEIERLQKEIERHKQKIKMLKHDD

SEQ ID NO: 1235 - protein, 106 aa, Artificial Sequence
  Designed; as detailed elsewhere in present application
MAVTALAARTWLGVWGVRTMQARGFGSDQSENVDRGAGSIREAGGAFGKREQAEEERYFRAQSREQLAALKKHHEEEISHHKKEIERLQKEIERHKQKIKMLKHDD

SEQ ID NO: 1236 - protein, 106 aa, Artificial Sequence
  Designed; as detailed elsewhere in present application
MAVTALAARTWLGVWGVRTMQARGFGSDQSENVDRGAGSIREAGGAFGKREQAEEERYFRAQSREQLAALKKHHEEEIDHHKKEIERLQKEIERHKQKIKMLKHDD

SEQ ID NO: 1237 - protein, 106 aa, Artificial Sequence
  Designed; as detailed elsewhere in present application
MAVTALAARTWLGVWGVRTMQARGFGSDQSENVDRGAGSIREAGGAFGKREQAEEERYFRAQSREQLAALKKHHENEIVHHKKEIERLQKEIERHKQKIKMLKHDD

SEQ ID NO: 1238 - protein, 106 aa, Artificial Sequence
  Designed; as detailed elsewhere in present application
MAVTALAARTWLGVWGVRTMQARGFGSDQSENVDRGAGSIREAGGAFGKREQAEEERYFRARAKEQLAALKKHHEEEIVHHKKEIERLQKEIERHKQKIKMLKHDD

SEQ ID NO: 1239 - protein, 106 aa, Artificial Sequence
  Designed; as detailed elsewhere in present application
MAVTALAARTWLGVWGVRTMQARGFGSDQSENVDRGAGSIREAGGAFGKKEQAEEERYFRAQSREQLAALKKHHEEEIVHHKKEIERLQKEIERHKQKIKMLKHDD

SEQ ID NO: 1240 - protein, 106 aa, Artificial Sequence
  Designed; as detailed elsewhere in present application
MAVTALAARTWLGVWGVRTMQARGFGSDQSENVDRGAGSIRDAGGAFGKREQAEEERYFRAQSREQLAALKKHHEEEIVHHKKEIERLQKEIERHKQKIKMLKHDD

SEQ ID NO: 1241 - protein, 106 aa, Artificial Sequence; identical to SEQ ID NO: 678
  Designed; as detailed elsewhere in present application

SEQ ID NO: 1242 - protein, 106 aa, Artificial Sequence
  Designed; as detailed elsewhere in present application
MAVTALAARTWLGVWGVRTMQARGFGSDQSENVGRGAGSIREAGGAFGKREQAEEERYFRAQSREQLAALKKHHEEEIVHHKKEIERLQKEIERHKQKIKMLKHDD

SEQ ID NO: 1243 - protein, 106 aa, Artificial Sequence
  Designed; as detailed elsewhere in present application
MAVTALAARTWLGVWGVRTMQARGFGSDQAENVDRGAGSIREAGGAFGKREQAEEERYFRAQSREQLAALKKHHEEEIVHHKKEIERLQKEIERHKQKIKMLKHDD

SEQ ID NO: 1244 - protein, 106 aa, Artificial Sequence
  Designed; as detailed elsewhere in present application
MAVTALAARTWLGVWGVRTMQARGFGSESADNLGSSAGSIREAGGAFGKREQAEEERYFRAQSREQLAALKKHHEEEIVHHKKEIERLQKEIERHKQKIKMLKHDD

SEQ ID NO: 1245 - protein, 107 aa, Artificial Sequence
  Designed; as detailed elsewhere in present application
MAVTALAARTWLGVWGVRTMQARGFGSDQSENVDRGAGSIREAGGAFGKREQAEEERYFRAQSREQLAALKKHHENEISHHVKEIEHLQKEIERHKQSIKKLKHDDD

SEQ ID NO: 1246 - protein, 107 aa, Artificial Sequence
  Designed; as detailed elsewhere in present application
MAVTALAARTWLGVWGVRTMQARGFGSDQSENVDRGAGSIRDAGGAFGKKEQAEEERYFRARAKEQLAALKKHHENEISHHVKEIEHLQKEIERHKQSIKKLKHDDD

SEQ ID NO: 1247 - protein, 107 aa, Artificial Sequence; identical to SEQ ID NO: 14
  Designed; as detailed elsewhere in present application

SEQ ID NO: 1248 - protein, 108 aa, Artificial Sequence
  Designed; as detailed elsewhere in present application
MAVTALAARTWLGVWGVRTMQARGFGSESADNLGSSAGAIRDAGGAFGKKEQAEEERYFRARAKEQLAALKKHHENEISHHVKEIEHLQKEIERHKQSIKKLKHDDDD

SEQ ID NO: 1249 - protein, 107 aa, Artificial Sequence
  Designed; as detailed elsewhere in present application
MAVTALAARTWLGVWGVRTMQARGFGSESADNLGSSAGAIRDAGGAFGKKEQAEEERYFRARAKEQLAALKKHKENEISHHVKEIEHLQKEIERHKQSIKKLKHDDD

SEQ ID NO: 1250 - protein, 107 aa, Artificial Sequence
  Designed; as detailed elsewhere in present application
MAVTALAARTWLGVWGVRTMQARGFGSESADNLGSSAGAIRDAGGAFGKKEQAEEERYFRARAKEQLAALKKHKENEIDHHVKEIEHLQKEIERHKQSIKKLKHDDD

SEQ ID NO: 1251 - protein, 108 aa, Artificial Sequence
  Designed; as detailed elsewhere in present application
MAVTALAARTWLGVWGVRTMQARGFGSESADNLGSSAGAIRDAGGAFGKKEQAEEERYFRARAKEQLAALKKHKENEIDHHVKEIEHLQKEIERHKQSIKKLKHDDDD

SEQ ID NO: 1252 - protein, 108 aa, Artificial Sequence
  Designed; as detailed elsewhere in present application
MAVTALAARTWLGVWGVRTMQARGFGSESADNLGSSAGAIRDAGGAFGKKAQAEEERYFRARAKEQLAALKKHKENEIDHHVKEIEHLQKEIERHKQSIKKLKHDDDD

SEQ ID NO: 1253 - protein, 107 aa, Artificial Sequence
  Designed; as detailed elsewhere in present application
MAVTALAARTWLGVWGVRTMQARGFGSDQSENVDRGAGAIREAGGAFGKREQAEEERYFRAQSREQLAALKKHHEEEIVHHKKEIERLQKEIERHKQKIKKLKHDDD

SEQ ID NO: 1254 - protein, 108 aa, Artificial Sequence
  Designed; as detailed elsewhere in present application
MAVTALAARTWLGVWGVRTMQARGFGSDQSENVDRGAGAIREAGGAFGKREQAEEERYFRAQSREQLAALKKHHEEEIVHHKKEIERLQKEIERHKQKIKKLKHDDDD

SEQ ID NO: 1255 - protein, 109 aa, Artificial Sequence
  Designed; as detailed elsewhere in present application
MAVTALAARTWLGVWGVRTMQARGFGSDQSENVDRGAGAIREAGGAFGKREQAEEERYFRAQSREQLAALKKHHEEEIVHHKKEIERLQKEIERHKQKIKKLKHDDDDD

SEQ ID NO: 1256 - protein, 106 aa, Artificial Sequence
  Designed; as detailed elsewhere in present application
MAVTALAARTWLGVWGVRTMQARGFGSDQSENVDRGAGAIREAGGAFGKREQAEEERYFRAQSREQLAALKKHKEEEIVHHKKEIERLQKEIERHKQKIKKLKHDD

SEQ ID NO: 1257 - protein, 107 aa, Artificial Sequence
  Designed; as detailed elsewhere in present application
MAVTALAARTWLGVWGVRTMQARGFGSDQSENVDRGAGAIREAGGAFGKREQAEEERYFRAQSREQLAALKKHKEEEIVHHKKEIERLQKEIERHKQKIKKLKHDDD

SEQ ID NO: 1258 - protein, 108 aa, Artificial Sequence
  Designed; as detailed elsewhere in present application
MAVTALAARTWLGVWGVRTMQARGFGSDQSENVDRGAGAIREAGGAFGKREQAEEERYFRAQSREQLAALKKHKEEEIVHHKKEIERLQKEIERHKQKIKKLKHDDDD

SEQ ID NO: 1259 - protein, 109 aa, Artificial Sequence
  Designed; as detailed elsewhere in present application
MAVTALAARTWLGVWGVRTMQARGFGSDQSENVDRGAGAIREAGGAFGKREQAEEERYFRAQSREQLAALKKHKEEEIVHHKKEIERLQKEIERHKQKIKKLKHDDDDD

SEQ ID NO: 1260 - protein, 107 aa, Artificial Sequence
  Designed; as detailed elsewhere in present application
MAVTALAARTWLGVWGVRTMQARGFGSDQAENVGRGAGAIREAGGAFGKREQAEEERYFRAQSREQLAALKKHHEEEIVHHKKEIERLQKEIERHKQKIKKLKHDDD

SEQ ID NO: 1261 - protein, 107 aa, Artificial Sequence
  Designed; as detailed elsewhere in present application
MAVTALAARTWLGVWGVRTMQARGFGSDQAENVGRGAGAIREAGGAFGKREQAEEERYFRAQSREQLAALKKHKEEEIVHHKKEIERLQKEIERHKQKIKKLKHDDD

SEQ ID NO: 1262 - protein, 107 aa, Artificial Sequence
  Designed; as detailed elsewhere in present application
MAVTALAARTWLGVWGVRTMQARGFGSDQAENVGRGAGAIREAGGAFGKRAQAEEERYFRAQSREQLAALKKHKEEEIVHHKKEIERLQKEIERHKQKIKKLKHDDD

SEQ ID NO: 1263 - protein, 107 aa, Artificial Sequence
  Designed; as detailed elsewhere in present application
MAVTALAARTWLGVWGVRTMQARGFGSDQAENVGRGAGAIREAGGAFGKREQAEEERYFRAQSREQLAALKKHKEEEIVAHKKEIERLQKEIERHKQKIKKLKHDDD

SEQ ID NO: 1264 - protein, 107 aa, Artificial Sequence; identical to SEQ ID NO: 14
  Designed; as detailed elsewhere in present application

SEQ ID NO: 1265 - protein, 107 aa, Artificial Sequence; identical to SEQ ID NO: 15
  Designed; as detailed elsewhere in present application

SEQ ID NO: 1266 - protein, 107 aa, Artificial Sequence; identical to SEQ ID NO: 1249
  Designed; as detailed elsewhere in present application

SEQ ID NO: 1267 - protein, 107 aa, Artificial Sequence
  Designed; as detailed elsewhere in present application
MAGSALAVRARFGVWGMKVLQTRGFGSESADNLGSSAGAIRDAGGAFGKKEQAEEERYFRARAKEQLAALKKHKENEISHHVKEIEHLQKEIERHKQSIKKLKHDDD

SEQ ID NO: 1268 - protein, 120 aa, Artificial Sequence
  Designed; as detailed elsewhere in present application
GYGRKKRRQRRRGMAVTALAARTWLGVWGVRTMQARGFGSESADNLGSSAGAIRDAGGAFGKKEQAEEERYFRARAKEQLAALKKHHENEISHHVKEIEHLQKEIERHKQSIKKLKHDDD

SEQ ID NO: 1269 - protein, 120 aa, Artificial Sequence
  Designed; as detailed elsewhere in present application
GYGRKKRRQRRRGMAGSALAVRARFGVWGMKVLQTRGFGSESADNLGSSAGAIRDAGGAFGKKEQAEEERYFRARAKEQLAALKKHHENEISHHVKEIEHLQKEIERHKQSIKKLKHDDD

SEQ ID NO: 1270 - protein, 120 aa, Artificial Sequence
  Designed; as detailed elsewhere in present application
GYGRKKRRQRRRGMAVTALAARTWLGVWGVRTMQARGFGSESADNLGSSAGAIRDAGGAFGKKEQAEEERYFRARAKEQLAALKKHKENEISHHVKEIEHLQKEIERHKQSIKKLKHDDD

SEQ ID NO: 1271 - protein, 120 aa, Artificial Sequence
  Designed; as detailed elsewhere in present application
GYGRKKRRQRRRGMAGSALAVRARFGVWGMKVLQTRGFGSESADNLGSSAGAIRDAGGAFGKKEQAEEERYFRARAKEQLAALKKHKENEISHHVKEIEHLQKEIERHKQSIKKLKHDDD

SEQ ID NO: 1272 - protein, 128 aa, Artificial Sequence
  Designed; as detailed elsewhere in present application
DYKDDDDKGYGRKKRRQRRRGMAVTALAARTWLGVWGVRTMQARGFGSESADNLGSSAGAIRDAGGAFGKKEQAEEERYFRARAKEQLAALKKHHENEISHHVKEIEHLQKEIERHKQSIKKLKHDDD

SEQ ID NO: 1273 - protein, 128 aa, Artificial Sequence
  Designed; as detailed elsewhere in present application
DYKDDDDKGYGRKKRRQRRRGMAGSALAVRARFGVWGMKVLQTRGFGSESADNLGSSAGAIRDAGGAFGKKEQAEEERYFRARAKEQLAALKKHHENEISHHVKEIEHLQKEIERHKQSIKKLKHDDD

SEQ ID NO: 1274 - protein, 128 aa, Artificial Sequence
  Designed; as detailed elsewhere in present application
DYKDDDDKGYGRKKRRQRRRGMAVTALAARTWLGVWGVRTMQARGFGSESADNLGSSAGAIRDAGGAFGKKEQAEEERYFRARAKEQLAALKKHKENEISHHVKEIEHLQKEIERHKQSIKKLKHDDD

SEQ ID NO: 1275 - protein, 128 aa, Artificial Sequence
  Designed; as detailed elsewhere in present application
DYKDDDDKGYGRKKRRQRRRGMAGSALAVRARFGVWGMKVLQTRGFGSESADNLGSSAGAIRDAGGAFGKKEQAEEERYFRARAKEQLAALKKHKENEISHHVKEIEHLQKEIERHKQSIKKLKHDDD

SEQ ID NO: 1276 - protein, 34 aa, Artificial Sequence
  Designed; as detailed elsewhere in present application
AIRDAGGAFGKKEQAEEERYFRARAKEQLAALKK

SEQ ID NO: 1277 - protein, 17 aa, Artificial Sequence
  Designed; as detailed elsewhere in present application
LAALKKHHENEISHHVK

SEQ ID NO: 1278 - protein, 59 aa, Artificial Sequence
  Designed; as detailed elsewhere in present application
MAVTALAARTWLGVWGVRTMQARGFAIRDAGGAFGKKEQAEEERYFRARAKEQLAALKK

SEQ ID NO: 1279 - protein, 59 aa, Artificial Sequence
  Designed; as detailed elsewhere in present application
MAGSALAVRARFGVWGMKVLQTRGFAIRDAGGAFGKKEQAEEERYFRARAKEQLAALKK

SEQ ID NO: 1280 - protein, 42 aa, Artificial Sequence
  Designed; as detailed elsewhere in present application
MAVTALAARTWLGVWGVRTMQARGFLAALKKHHENEISHHVK

SEQ ID NO: 1281 - protein, 42 aa, Artificial Sequence
  Designed; as detailed elsewhere in present application
MAGSALAVRARFGVWGMKVLQTRGFLAALKKHHENEISHHVK

SEQ ID NO: 1282 - protein, 72 aa, Artificial Sequence
  Designed; as detailed elsewhere in present application
GYGRKKRRQRRRGMAVTALAARTWLGVWGVRTMQARGFAIRDAGGAFGKKEQAEEERYFRARAKEQLAALKK

SEQ ID NO: 1283 - protein, 72 aa, Artificial Sequence
  Designed; as detailed elsewhere in present application
GYGRKKRRQRRRGMAGSALAVRARFGVWGMKVLQTRGFAIRDAGGAFGKKEQAEEERYFRARAKEQLAALKK

SEQ ID NO: 1284 - protein, 55 aa, Artificial Sequence
  Designed; as detailed elsewhere in present application
GYGRKKRRQRRRGMAVTALAARTWLGVWGVRTMQARGFLAALKKHHENEISHHVK

SEQ ID NO: 1285 - protein, 55 aa, Artificial Sequence
  Designed; as detailed elsewhere in present application
GYGRKKRRQRRRGMAGSALAVRARFGVWGMKVLQTRGFLAALKKHHENEISHHVK

SEQ ID NO: 1286 - protein, 80 aa, Artificial Sequence
  Designed; as detailed elsewhere in present application
DYKDDDDKGYGRKKRRQRRRGMAVTALAARTWLGVWGVRTMQARGFAIRDAGGAFGKKEQAEEERYFRARAKEQLAALKK

SEQ ID NO: 1287 - protein, 80 aa, Artificial Sequence
  Designed; as detailed elsewhere in present application
DYKDDDDKGYGRKKRRQRRRGMAGSALAVRARFGVWGMKVLQTRGFAIRDAGGAFGKKEQAEEERYFRARAKEQLAALKK

SEQ ID NO: 1288 - protein, 63 aa, Artificial Sequence
  Designed; as detailed elsewhere in present application
DYKDDDDKGYGRKKRRQRRRGMAVTALAARTWLGVWGVRTMQARGFLAALKKHHENEISHHVK

SEQ ID NO: 1289 - protein, 63 aa, Artificial Sequence
  Designed; as detailed elsewhere in present application
DYKDDDDKGYGRKKRRQRRRGMAGSALAVRARFGVWGMKVLQTRGFLAALKKHHENEISHHVK

SEQ ID NO: 1290 - protein, 107 aa, Artificial Sequence
  Designed; as detailed elsewhere in present application
MAVTALAARTWLGVWGVRTMQARGFGSESADNLGSSAGAIRDAGGAFGKKAQAEEERYFRARAKEQLAALKKAKENEISAHVKEIEHLQKEIERHKQSIKKLKHDDD

SEQ ID NO: 1291 - protein, 107 aa, Artificial Sequence
  Designed; as detailed elsewhere in present application
MAGSALAVRARFGVWGMKVLQTRGFGSESADNLGSSAGAIRDAGGAFGKKAQAEEERYFRARAKEQLAALKKAKENEISAHVKEIEHLQKEIERHKQSIKKLKHDDD

SEQ ID NO: 1292 - protein, 120 aa, Artificial Sequence
  Designed; as detailed elsewhere in present application
GYGRKKRRQRRRGMAVTALAARTWLGVWGVRTMQARGFGSESADNLGSSAGAIRDAGGAFGKKAQAEEERYFRARAKEQLAALKKAKENEISAHVKEIEHLQKEIERHKQSIKKLKHDDD

SEQ ID NO: 1293 - protein, 120 aa, Artificial Sequence
  Designed; as detailed elsewhere in present application
GYGRKKRRQRRRGMAGSALAVRARFGVWGMKVLQTRGFGSESADNLGSSAGAIRDAGGAFGKKAQAEEERYFRARAKEQLAALKKAKENEISAHVKEIEHLQKEIERHKQSIKKLKHDDD

SEQ ID NO: 1294 - protein, 128 aa, Artificial Sequence
  Designed; as detailed elsewhere in present application
DYKDDDDKGYGRKKRRQRRRGMAVTALAARTWLGVWGVRTMQARGFGSESADNLGSSAGAIRDAGGAFGKKAQAEEERYFRARAKEQLAALKKAKENEISAHVKEIEHLQKEIERHKQSIKKLKHDDD

SEQ ID NO: 1295 - protein, 128 aa, Artificial Sequence
  Designed; as detailed elsewhere in present application
DYKDDDDKGYGRKKRRQRRRGMAGSALAVRARFGVWGMKVLQTRGFGSESADNLGSSAGAIRDAGGAFGKKAQAEEERYFRARAKEQLAALKKAKENEISAHVKEIEHLQKEIERHKQSIKKLKHDDD

SEQ ID NO: 1296 - protein, 107 aa, Artificial Sequence
  Designed; as detailed elsewhere in present application
MAVTALAARTWLGVWGVRTMQARGFGSESADNLGSSAGAIRDAGGAFGKKEQAEEERYFRARAKEQLAALKKAKENEISAHVKEIEHLQKEIERHKQSIKKLKHDDD

SEQ ID NO: 1297 - protein, 120 aa, Artificial Sequence
  Designed; as detailed elsewhere in present application
GYGRKKRRQRRRGMAVTALAARTWLGVWGVRTMQARGFGSESADNLGSSAGAIRDAGGAFGKKEQAEEERYFRARAKEQLAALKKAKENEISAHVKEIEHLQKEIERHKQSIKKLKHDDD

SEQ ID NO: 1298 - protein, 128 aa, Artificial Sequence
  Designed; as detailed elsewhere in present application
DYKDDDDKGYGRKKRRQRRRGMAVTALAARTWLGVWGVRTMQARGFGSESADNLGSSAGAIRDAGGAFGKKEQAEEERYFRARAKEQLAALKKAKENEISAHVKEIEHLQKEIERHKQSIKKLKHDDD

SEQ ID NO: 1299 - protein, 107 aa, Artificial Sequence
  Designed; as detailed elsewhere in present application
MAVTALAARTWLGVWGVRTMQARGFGSEPADNLGSSEATVWNAGVDFRKREQAKGERYLRARAKEQLAALKKHHENEISHHVKEIEHLQKEIERHKQSIKKLKHDDD

SEQ ID NO: 1300 - protein, 107 aa, Artificial Sequence
  Designed; as detailed elsewhere in present application
MAGSALAVRARFGVWGMKVLQTRGFGSEPADNLGSSEATVWNAGVDFRKREQAKGERYLRARAKEQLAALKKHHENEISHHVKEIEHLQKEIERHKQSIKKLKHDDD

SEQ ID NO: 1301 - protein, 107 aa, Artificial Sequence
  Designed; as detailed elsewhere in present application
MAVTALAARTWLGVWGVRTMQARGFGSEPADNLGSSEAAVWNAGVDFRKREQAKGERYLRARAKEQLAALKKHKENEISHHVKEIEHLQKEIERHKQSIKKLKHDDD

SEQ ID NO: 1302 - protein, 107 aa, Artificial Sequence
  Designed; as detailed elsewhere in present application
MAGSALAVRARFGVWGMKVLQTRGFGSEPADNLGSSEAAVWNAGVDFRKREQAKGERYLRARAKEQLAALKKHKENEISHHVKEIEHLQKEIERHKQSIKKLKHDDD

SEQ ID NO: 1303 - protein, 120 aa, Artificial Sequence
  Designed; as detailed elsewhere in present application
GYGRKKRRQRRRGMAVTALAARTWLGVWGVRTMQARGFGSEPADNLGSSEATVWNAGVDFRKREQAKGERYLRARAKEQLAALKKHHENEISHHVKEIEHLQKEIERHKQSIKKLKHDDD

SEQ ID NO: 1304 - protein, 120 aa, Artificial Sequence
  Designed; as detailed elsewhere in present application
GYGRKKRRQRRRGMAGSALAVRARFGVWGMKVLQTRGFGSEPADNLGSSEATVWNAGVDFRKREQAKGERYLRARAKEQLAALKKHHENEISHHVKEIEHLQKEIERHKQSIKKLKHDDD

SEQ ID NO: 1305 - protein, 120 aa, Artificial Sequence
  Designed; as detailed elsewhere in present application
GYGRKKRRQRRRGMAVTALAARTWLGVWGVRTMQARGFGSEPADNLGSSEAAVWNAGVDFRKREQAKGERYLRARAKEQLAALKKHKENEISHHVKEIEHLQKEIERHKQSIKKLKHDDD

SEQ ID NO: 1306 - protein, 120 aa, Artificial Sequence
  Designed; as detailed elsewhere in present application
GYGRKKRRQRRRGMAGSALAVRARFGVWGMKVLQTRGFGSEPADNLGSSEAAVWNAGVDFRKREQAKGERYLRARAKEQLAALKKHKENEISHHVKEIEHLQKEIERHKQSIKKLKHDDD

SEQ ID NO: 1307 - protein, 128 aa, Artificial Sequence
  Designed; as detailed elsewhere in present application
DYKDDDDKGYGRKKRRQRRRGMAVTALAARTWLGVWGVRTMQARGFGSEPADNLGSSEATVWNAGVDFRKREQAKGERYLRARAKEQLAALKKHHENEISHHVKEIEHLQKEIERHKQSIKKLKHDDD

SEQ ID NO: 1308 - protein, 128 aa, Artificial Sequence
  Designed; as detailed elsewhere in present application
DYKDDDDKGYGRKKRRQRRRGMAGSALAVRARFGVWGMKVLQTRGFGSEPADNLGSSEATVWNAGVDFRKREQAKGERYLRARAKEQLAALKKHHENEISHHVKEIEHLQKEIERHKQSIKKLKHDDD

SEQ ID NO: 1309 - protein, 128 aa, Artificial Sequence
  Designed; as detailed elsewhere in present application
DYKDDDDKGYGRKKRRQRRRGMAVTALAARTWLGVWGVRTMQARGFGSEPADNLGSSEAAVWNAGVDFRKREQAKGERYLRARAKEQLAALKKHKENEISHHVKEIEHLQKEIERHKQSIKKLKHDDD

SEQ ID NO: 1310 - protein, 128 aa, Artificial Sequence
  Designed; as detailed elsewhere in present application
DYKDDDDKGYGRKKRRQRRRGMAGSALAVRARFGVWGMKVLQTRGFGSEPADNLGSSEAAVWNAGVDFRKREQAKGERYLRARAKEQLAALKKHKENEISHHVKEIEHLQKEIERHKQSIKKLKHDDD

SEQ ID NO: 1311 - protein, 34 aa, Artificial Sequence
  Designed; as detailed elsewhere in present application
TVWNAGVDFRKREQAKGERYLRARAKEQLAALKK

SEQ ID NO: 1312 - protein, 34 aa, Artificial Sequence
  Designed; as detailed elsewhere in present application
AVWNAGVDFRKREQAKGERYLRARAKEQLAALKK

SEQ ID NO: 1313 - protein, 33 aa, Artificial Sequence
  Designed; as detailed elsewhere in present application
AVWNAGVDFRKREQAKGERYLRARAKEQLAALK

SEQ ID NO: 1314 - protein, 32 aa, Artificial Sequence
  Designed; as detailed elsewhere in present application
AVWNAGVDFRKREQAKGERYLRARAKEQLAAL

SEQ ID NO: 1315 - protein, 31 aa, Artificial Sequence
  Designed; as detailed elsewhere in present application
AVWNAGVDFRKREQAKGERYLRARAKEQLAA

SEQ ID NO: 1316 - protein, 59 aa, Artificial Sequence
  Designed; as detailed elsewhere in present application
MAVTALAARTWLGVWGVRTMQARGFTVWNAGVDFRKREQAKGERYLRARAKEQLAALKK

SEQ ID NO: 1317 - protein, 59 aa, Artificial Sequence
  Designed; as detailed elsewhere in present application
MAGSALAVRARFGVWGMKVLQTRGFTVWNAGVDFRKREQAKGERYLRARAKEQLAALKK

SEQ ID NO: 1318 - protein, 72 aa, Artificial Sequence
  Designed; as detailed elsewhere in present application
GYGRKKRRQRRRGMAVTALAARTWLGVWGVRTMQARGFTVWNAGVDFRKREQAKGERYLRARAKEQLAALKK

SEQ ID NO: 1319 - protein, 72 aa, Artificial Sequence
  Designed; as detailed elsewhere in present application
GYGRKKRRQRRRGMAGSALAVRARFGVWGMKVLQTRGFTVWNAGVDFRKREQAKGERYLRARAKEQLAALKK

SEQ ID NO: 1320 - protein, 80 aa, Artificial Sequence
  Designed; as detailed elsewhere in present application
DYKDDDDKGYGRKKRRQRRRGMAVTALAARTWLGVWGVRTMQARGFTVWNAGVDFRKREQAKGERYLRARAKEQLAALKK

SEQ ID NO: 1321 - protein, 80 aa, Artificial Sequence
  Designed; as detailed elsewhere in present application
DYKDDDDKGYGRKKRRQRRRGMAGSALAVRARFGVWGMKVLQTRGFTVWNAGVDFRKREQAKGERYLRARAKEQLAALKK

SEQ ID NO: 1322 - protein, 59 aa, Artificial Sequence
  Designed; as detailed elsewhere in present application
MAVTALAARTWLGVWGVRTMQARGFAVWNAGVDFRKREQAKGERYLRARAKEQLAALKK

SEQ ID NO: 1323 - protein, 59 aa, Artificial Sequence
  Designed; as detailed elsewhere in present application
MAGSALAVRARFGVWGMKVLQTRGFAVWNAGVDFRKREQAKGERYLRARAKEQLAALKK

SEQ ID NO: 1324 - protein, 72 aa, Artificial Sequence
  Designed; as detailed elsewhere in present application
GYGRKKRRQRRRGMAVTALAARTWLGVWGVRTMQARGFAVWNAGVDFRKREQAKGERYLRARAKEQLAALKK

SEQ ID NO: 1325 - protein, 72 aa, Artificial Sequence
  Designed; as detailed elsewhere in present application
GYGRKKRRQRRRGMAGSALAVRARFGVWGMKVLQTRGFAVWNAGVDFRKREQAKGERYLRARAKEQLAALKK

SEQ ID NO: 1326 - protein, 80 aa, Artificial Sequence
  Designed; as detailed elsewhere in present application
DYKDDDDKGYGRKKRRQRRRGMAVTALAARTWLGVWGVRTMQARGFAVWNAGVDFRKREQAKGERYLRARAKEQLAALKK

SEQ ID NO: 1327 - protein, 80 aa, Artificial Sequence
  Designed; as detailed elsewhere in present application
DYKDDDDKGYGRKKRRQRRRGMAGSALAVRARFGVWGMKVLQTRGFAVWNAGVDFRKREQAKGERYLRARAKEQLAALKK

SEQ ID NO: 1328 - protein, 106 aa, Artificial Sequence; identical to SEQ ID NO: 639
  Designed; as detailed elsewhere in present application

SEQ ID NO: 1329 - protein, 106 aa, Artificial Sequence
  Designed; as detailed elsewhere in present application
MAGSALAVRARFGVWGMKVLQTRGFGSDQSENVDRGAGSIREAGGAFGKREQAEEERYFRAQSREQLAALKKHHEEEIVHHKKEIERLQKEIERHKQKIKMLKHDD

SEQ ID NO: 1330 - protein, 106 aa, Artificial Sequence; identical to SEQ ID NO: 782
  Designed; as detailed elsewhere in present application

SEQ ID NO: 1331 - protein, 106 aa, Artificial Sequence
  Designed; as detailed elsewhere in present application
MAGSALAVRARFGVWGMKVLQTRGFGSDQSENVDRGAGAIREAGGAFGKREQAEEERYFRAQSREQLAALKKHKEEEIVHHKKEIERLQKEIERHKQKIKMLKHDD

SEQ ID NO: 1332 - protein, 114 aa, Artificial Sequence
  Designed; as detailed elsewhere in present application
RRRRRRRGMAVTALAARTWLGVWGVRTMQARGFGSDQSENVDRGAGSIREAGGAFGKREQAEEERYFRAQSREQLAALKKHHEEEIVHHKKEIERLQKEIERHKQKIKMLKHDD

SEQ ID NO: 1333 - protein, 114 aa, Artificial Sequence
  Designed; as detailed elsewhere in present application
RRRRRRRGMAGSALAVRARFGVWGMKVLQTRGFGSDQSENVDRGAGSIREAGGAFGKREQAEEERYFRAQSREQLAALKKHHEEEIVHHKKEIERLQKEIERHKQKIKMLKHDD

SEQ ID NO: 1334 - protein, 114 aa, Artificial Sequence
  Designed; as detailed elsewhere in present application
RRRRRRRGMAVTALAARTWLGVWGVRTMQARGFGSDQSENVDRGAGAIREAGGAFGKREQAEEERYFRAQSREQLAALKKHKEEEIVHHKKEIERLQKEIERHKQKIKMLKHDD

SEQ ID NO: 1335 - protein, 114 aa, Artificial Sequence
  Designed; as detailed elsewhere in present application
RRRRRRRGMAGSALAVRARFGVWGMKVLQTRGFGSDQSENVDRGAGAIREAGGAFGKREQAEEERYFRAQSREQLAALKKHKEEEIVHHKKEIERLQKEIERHKQKIKMLKHDD

SEQ ID NO: 1336 - protein, 128 aa, Artificial Sequence
  Designed; as detailed elsewhere in present application
HHHHHHDYKDDDDKRRRRRRRGMAVTALAARTWLGVWGVRTMQARGFGSDQSENVDRGAGSIREAGGAFGKREQAEEERYFRAQSREQLAALKKHHEEEIVHHKKEIERLQKEIERHKQKIKMLKHDD

SEQ ID NO: 1337 - protein, 128 aa, Artificial Sequence
  Designed; as detailed elsewhere in present application
HHHHHHDYKDDDDKRRRRRRRGMAGSALAVRARFGVWGMKVLQTRGFGSDQSENVDRGAGSIREAGGAFGKREQAEEERYFRAQSREQLAALKKHHEEEIVHHKKEIERLQKEIERHKQKIKMLKHDD

SEQ ID NO: 1338 - protein, 128 aa, Artificial Sequence
  Designed; as detailed elsewhere in present application
HHHHHHDYKDDDDKRRRRRRRGMAVTALAARTWLGVWGVRTMQARGFGSDQSENVDRGAGAIREAGGAFGKREQAEEERYFRAQSREQLAALKKHKEEEIVHHKKEIERLQKEIERHKQKIKMLKHDD

SEQ ID NO: 1339 - protein, 128 aa, Artificial Sequence
  Designed; as detailed elsewhere in present application
HHHHHHDYKDDDDKRRRRRRRGMAGSALAVRARFGVWGMKVLQTRGFGSDQSENVDRGAGAIREAGGAFGKREQAEEERYFRAQSREQLAALKKHKEEEIVHHKKEIERLQKEIERHKQKIKMLKHDD

SEQ ID NO: 1340 - protein, 34 aa, Artificial Sequence; identical to SEQ ID NO: 877
  Designed; as detailed elsewhere in present application

SEQ ID NO: 1341 - protein, 34 aa, Artificial Sequence
  Designed; as detailed elsewhere in present application
AIREAGGAFGKREQAEEERYFRAQSREQLAALKK

SEQ ID NO: 1342 - protein, 33 aa, Artificial Sequence
  Designed; as detailed elsewhere in present application
AIREAGGAFGKREQAEEERYFRAQSREQLAALK

SEQ ID NO: 1343 - protein, 32 aa, Artificial Sequence
  Designed; as detailed elsewhere in present application
AIREAGGAFGKREQAEEERYFRAQSREQLAAL

SEQ ID NO: 1344 - protein, 59 aa, Artificial Sequence; identical to SEQ ID NO: 902
  Designed; as detailed elsewhere in present application

SEQ ID NO: 1345 - protein, 59 aa, Artificial Sequence
  Designed; as detailed elsewhere in present application
MAGSALAVRARFGVWGMKVLQTRGFSIREAGGAFGKREQAEEERYFRAQSREQLAALKK

SEQ ID NO: 1346 - protein, 67 aa, Artificial Sequence
  Designed; as detailed elsewhere in present application
RRRRRRRGMAVTALAARTWLGVWGVRTMQARGFSIREAGGAFGKREQAEEERYFRAQSREQLAALKK

SEQ ID NO: 1347 - protein, 67 aa, Artificial Sequence
  Designed; as detailed elsewhere in present application
RRRRRRRGMAGSALAVRARFGVWGMKVLQTRGFSIREAGGAFGKREQAEEERYFRAQSREQLAALKK

SEQ ID NO: 1348 - protein, 81 aa, Artificial Sequence
  Designed; as detailed elsewhere in present application
HHHHHHDYKDDDDKRRRRRRRGMAVTALAARTWLGVWGVRTMQARGFSIREAGGAFGKREQAEEERYFRAQSREQLAALKK

SEQ ID NO: 1349 - protein, 81 aa, Artificial Sequence
  Designed; as detailed elsewhere in present application
HHHHHHDYKDDDDKRRRRRRRGMAGSALAVRARFGVWGMKVLQTRGFSIREAGGAFGKREQAEEERYFRAQSREQLAALKK

SEQ ID NO: 1350 - protein, 59 aa, Artificial Sequence
  Designed; as detailed elsewhere in present application
MAVTALAARTWLGVWGVRTMQARGFAIREAGGAFGKREQAEEERYFRAQSREQLAALKK

SEQ ID NO: 1351 - protein, 59 aa, Artificial Sequence
  Designed; as detailed elsewhere in present application
MAGSALAVRARFGVWGMKVLQTRGFAIREAGGAFGKREQAEEERYFRAQSREQLAALKK

SEQ ID NO: 1352 - protein, 67 aa, Artificial Sequence
  Designed; as detailed elsewhere in present application
RRRRRRRGMAVTALAARTWLGVWGVRTMQARGFAIREAGGAFGKREQAEEERYFRAQSREQLAALKK

SEQ ID NO: 1353 - protein, 67 aa, Artificial Sequence
  Designed; as detailed elsewhere in present application
RRRRRRRGMAGSALAVRARFGVWGMKVLQTRGFAIREAGGAFGKREQAEEERYFRAQSREQLAALKK

SEQ ID NO: 1354 - protein, 81 aa, Artificial Sequence
  Designed; as detailed elsewhere in present application
HHHHHHDYKDDDDKRRRRRRRGMAVTALAARTWLGVWGVRTMQARGFAIREAGGAFGKREQAEEERYFRAQSREQLAALKK

SEQ ID NO: 1355 - protein, 81 aa, Artificial Sequence
  Designed; as detailed elsewhere in present application
HHHHHHDYKDDDDKRRRRRRRGMAGSALAVRARFGVWGMKVLQTRGFAIREAGGAFGKREQAEEERYFRAQSREQLAALKK

SEQ ID NO: 1356 - protein, 17 aa, Artificial Sequence
  Designed; as detailed elsewhere in present application
LAALKKHHEEEIVHHKK

SEQ ID NO: 1357 - protein, 42 aa, Artificial Sequence; identical to SEQ ID NO: 906
  Designed; as detailed elsewhere in present application

SEQ ID NO: 1358 - protein, 42 aa, Artificial Sequence
  Designed; as detailed elsewhere in present application
MAGSALAVRARFGVWGMKVLQTRGFLAALKKHHEEEIVHHKK

SEQ ID NO: 1359 - protein, 50 aa, Artificial Sequence
  Designed; as detailed elsewhere in present application
RRRRRRRGMAVTALAARTWLGVWGVRTMQARGFLAALKKHHEEEIVHHKK

SEQ ID NO: 1360 - protein, 50 aa, Artificial Sequence
  Designed; as detailed elsewhere in present application
RRRRRRRGMAGSALAVRARFGVWGMKVLQTRGFLAALKKHHEEEIVHHKK

SEQ ID NO: 1361 - protein, 64 aa, Artificial Sequence
  Designed; as detailed elsewhere in present application
HHHHHHDYKDDDDKRRRRRRRGMAVTALAARTWLGVWGVRTMQARGFLAALKKHHEEEIVHHKK

SEQ ID NO: 1362 - protein, 64 aa, Artificial Sequence
  Designed; as detailed elsewhere in present application
HHHHHHDYKDDDDKRRRRRRRGMAGSALAVRARFGVWGMKVLQTRGFLAALKKHHEEEIVHHKK

SEQ ID NO: 1363 - protein, 107 aa, Artificial Sequence
  Designed; as detailed elsewhere in present application
MAVTALAARTWLGVWGVRTMQARGFGSEPADNLGSSEAAVWNAGVDFRKREQAKGERYLRARAKEQLAALKKHKENEISAHVKEIEHLQKEIERHKQSIKKLKHDDD

SEQ ID NO: 1364 - protein, 107 aa, Artificial Sequence
  Designed; as detailed elsewhere in present application
MAGSALAVRARFGVWGMKVLQTRGFGSEPADNLGSSEAAVWNAGVDFRKREQAKGERYLRARAKEQLAALKKHKENEISAHVKEIEHLQKEIERHKQSIKKLKHDDD

SEQ ID NO: 1365 - protein, 107 aa, Artificial Sequence
  Designed; as detailed elsewhere in present application
MAVTALAARTWLGVWGVRTMQARGFGSEPADNLGSSEAAVWNAGVDFRKRAQAKGERYLRARAKEQLAALKKHKENEISAHVKEIEHLQKEIERHKQSIKKLKHDDD

SEQ ID NO: 1366 - protein, 107 aa, Artificial Sequence
  Designed; as detailed elsewhere in present application
MAGSALAVRARFGVWGMKVLQTRGFGSEPADNLGSSEAAVWNAGVDFRKRAQAKGERYLRARAKEQLAALKKHKENEISAHVKEIEHLQKEIERHKQSIKKLKHDDD

SEQ ID NO: 1367 - protein, 115 aa, Artificial Sequence
  Designed; as detailed elsewhere in present application
RRRRRRRGMAVTALAARTWLGVWGVRTMQARGFGSEPADNLGSSEAAVWNAGVDFRKREQAKGERYLRARAKEQLAALKKHKENEISAHVKEIEHLQKEIERHKQSIKKLKHDDD

SEQ ID NO: 1368 - protein, 115 aa, Artificial Sequence
  Designed; as detailed elsewhere in present application
RRRRRRRGMAGSALAVRARFGVWGMKVLQTRGFGSEPADNLGSSEAAVWNAGVDFRKREQAKGERYLRARAKEQLAALKKHKENEISAHVKEIEHLQKEIERHKQSIKKLKHDDD

SEQ ID NO: 1369 - protein, 115 aa, Artificial Sequence
  Designed; as detailed elsewhere in present application
RRRRRRRGMAVTALAARTWLGVWGVRTMQARGFGSEPADNLGSSEAAVWNAGVDFRKRAQAKGERYLRARAKEQLAALKKHKENEISAHVKEIEHLQKEIERHKQSIKKLKHDDD

SEQ ID NO: 1370 - protein, 115 aa, Artificial Sequence
  Designed; as detailed elsewhere in present application
RRRRRRRGMAGSALAVRARFGVWGMKVLQTRGFGSEPADNLGSSEAAVWNAGVDFRKRAQAKGERYLRARAKEQLAALKKHKENEISAHVKEIEHLQKEIERHKQSIKKLKHDDD

SEQ ID NO: 1371 - protein, 129 aa, Artificial Sequence
  Designed; as detailed elsewhere in present application
HHHHHHDYKDDDDKRRRRRRRGMAVTALAARTWLGVWGVRTMQARGFGSEPADNLGSSEAAVWNAGVDFRKREQAKGERYLRARAKEQLAALKKHKENEISAHVKEIEHLQKEIERHKQSIKKLKHDDD

SEQ ID NO: 1372 - protein, 129 aa, Artificial Sequence
  Designed; as detailed elsewhere in present application
HHHHHHDYKDDDDKRRRRRRRGMAGSALAVRARFGVWGMKVLQTRGFGSEPADNLGSSEAAVWNAGVDFRKREQAKGERYLRARAKEQLAALKKHKENEISAHVKEIEHLQKEIERHKQSIKKLKHDDD

SEQ ID NO: 1373 - protein, 129 aa, Artificial Sequence
  Designed; as detailed elsewhere in present application
HHHHHHDYKDDDDKRRRRRRRGMAVTALAARTWLGVWGVRTMQARGFGSEPADNLGSSEAAVWNAGVDFRKRAQAKGERYLRARAKEQLAALKKHKENEISAHVKEIEHLQKEIERHKQSIKKLKHDDD

SEQ ID NO: 1374 - protein, 129 aa, Artificial Sequence
  Designed; as detailed elsewhere in present application
HHHHHHDYKDDDDKRRRRRRRGMAGSALAVRARFGVWGMKVLQTRGFGSEPADNLGSSEAAVWNAGVDFRKRAQAKGERYLRARAKEQLAALKKHKENEISAHVKEIEHLQKEIERHKQSIKKLKHDDD

SEQ ID NO: 1375 - protein, 107 aa, Artificial Sequence
  Designed; as detailed elsewhere in present application
MAVTALAARTWLGVWGVRTMQARGFGSEPADNLGSSEAAVWNAGVDFRKRAQAKGERYLRARAKEQLAALKKAKENEISAHVKEIEHLQKEIERHKQSIKKLKHDDD

SEQ ID NO: 1376 - protein, 115 aa, Artificial Sequence
  Designed; as detailed elsewhere in present application
RRRRRRRGMAVTALAARTWLGVWGVRTMQARGFGSEPADNLGSSEAAVWNAGVDFRKRAQAKGERYLRARAKEQLAALKKAKENEISAHVKEIEHLQKEIERHKQSIKKLKHDDD

SEQ ID NO: 1377 - protein, 129 aa, Artificial Sequence
  Designed; as detailed elsewhere in present application
HHHHHHDYKDDDDKRRRRRRRGMAVTALAARTWLGVWGVRTMQARGFGSEPADNLGSSEAAVWNAGVDFRKRAQAKGERYLRARAKEQLAALKKAKENEISAHVKEIEHLQKEIERHKQSIKKLKHDDD

SEQ ID NO: 1378 - protein, 106 aa, Artificial Sequence; identical to SEQ ID NO: 824
  Designed; as detailed elsewhere in present application

SEQ ID NO: 1379 - protein, 106 aa, Artificial Sequence
  Designed; as detailed elsewhere in present application
MAGSALAVRARFGVWGMKVLQTRGFGSDQSENVDRGAGAIREAGGAFGKRAQAEEERYFRAQSREQLAALKKHKEEEIVAHKKEIERLQKEIERHKQKIKMLKHDD

SEQ ID NO: 1380 - protein, 107 aa, Artificial Sequence
  Designed; as detailed elsewhere in present application
MAVTALAARTWLGVWGVRTMQARGFGSDQSENVDRGAGAIREAGGAFGKRAQAEEERYFRAQSREQLAALKKAKEEEIVAHKKEIERLQKEIERHKQKIKKLKHDDD

SEQ ID NO: 1381 - protein, 107 aa, Artificial Sequence
  Designed; as detailed elsewhere in present application
MAGSALAVRARFGVWGMKVLQTRGFGSDQSENVDRGAGAIREAGGAFGKRAQAEEERYFRAQSREQLAALKKAKEEEIVAHKKEIERLQKEIERHKQKIKKLKHDDD

SEQ ID NO: 1382 - protein, 114 aa, Artificial Sequence
  Designed; as detailed elsewhere in present application
RRRRRRRGMAVTALAARTWLGVWGVRTMQARGFGSDQSENVDRGAGAIREAGGAFGKRAQAEEERYFRAQSREQLAALKKHKEEEIVAHKKEIERLQKEIERHKQKIKMLKHDD

SEQ ID NO: 1383 - protein, 114 aa, Artificial Sequence
  Designed; as detailed elsewhere in present application
RRRRRRRGMAGSALAVRARFGVWGMKVLQTRGFGSDQSENVDRGAGAIREAGGAFGKRAQAEEERYFRAQSREQLAALKKHKEEEIVAHKKEIERLQKEIERHKQKIKMLKHDD

SEQ ID NO: 1384 - protein, 115 aa, Artificial Sequence
  Designed; as detailed elsewhere in present application
RRRRRRRGMAVTALAARTWLGVWGVRTMQARGFGSDQSENVDRGAGAIREAGGAFGKRAQAEEERYFRAQSREQLAALKKAKEEEIVAHKKEIERLQKEIERHKQKIKKLKHDDD

SEQ ID NO: 1385 - protein, 115 aa, Artificial Sequence
  Designed; as detailed elsewhere in present application
RRRRRRRGMAGSALAVRARFGVWGMKVLQTRGFGSDQSENVDRGAGAIREAGGAFGKRAQAEEERYFRAQSREQLAALKKAKEEEIVAHKKEIERLQKEIERHKQKIKKLKHDDD

SEQ ID NO: 1386 - protein, 128 aa, Artificial Sequence
  Designed; as detailed elsewhere in present application
HHHHHHDYKDDDDKRRRRRRRGMAVTALAARTWLGVWGVRTMQARGFGSDQSENVDRGAGAIREAGGAFGKRAQAEEERYFRAQSREQLAALKKHKEEEIVAHKKEIERLQKEIERHKQKIKMLKHDD

SEQ ID NO: 1387 - protein, 128 aa, Artificial Sequence
  Designed; as detailed elsewhere in present application
HHHHHHDYKDDDDKRRRRRRRGMAGSALAVRARFGVWGMKVLQTRGFGSDQSENVDRGAGAIREAGGAFGKRAQAEEERYFRAQSREQLAALKKHKEEEIVAHKKEIERLQKEIERHKQKIKMLKHDD

SEQ ID NO: 1388 - protein, 129 aa, Artificial Sequence
  Designed; as detailed elsewhere in present application
HHHHHHDYKDDDDKRRRRRRRGMAVTALAARTWLGVWGVRTMQARGFGSDQSENVDRGAGAIREAGGAFGKRAQAEEERYFRAQSREQLAALKKAKEEEIVAHKKEIERLQKEIERHKQKIKKLKHDDD

SEQ ID NO: 1389 - protein, 129 aa, Artificial Sequence
  Designed; as detailed elsewhere in present application
HHHHHHDYKDDDDKRRRRRRRGMAGSALAVRARFGVWGMKVLQTRGFGSDQSENVDRGAGAIREAGGAFGKRAQAEEERYFRAQSREQLAALKKAKEEEIVAHKKEIERLQKEIERHKQKIKKLKHDDD

SEQ ID NO: 1390 - protein, 106 aa, Artificial Sequence; identical to SEQ ID NO: 826
  Designed; as detailed elsewhere in present application

SEQ ID NO: 1391 - protein, 114 aa, Artificial Sequence
  Designed; as detailed elsewhere in present application
RRRRRRRGMAVTALAARTWLGVWGVRTMQARGFGSDQSENVDRGAGAIREAGGAFGKRAQAEEERYFRAQSREQLAALKKAKEEEIVAHKKEIERLQKEIERHKQKIKMLKHDD

SEQ ID NO: 1392 - protein, 128 aa, Artificial Sequence
  Designed; as detailed elsewhere in present application
HHHHHHDYKDDDDKRRRRRRRGMAVTALAARTWLGVWGVRTMQARGFGSDQSENVDRGAGAIREAGGAFGKRAQAEEERYFRAQSREQLAALKKAKEEEIVAHKKEIERLQKEIERHKQKIKMLKHDD

SEQ ID NO: 1393 - protein, 115 aa, Artificial Sequence
  Designed; as detailed elsewhere in present application
  DISULFID (8)..(9)
RRRRRRRCCMAVTALAARTWLGVWGVRTMQARGFGSDQSENVDRGAGSIREAGGAFGKREQAEEERYFRAQSREQLAALKKHHEEEIVHHKKEIERLQKEIERHKQKIKMLKHDD

SEQ ID NO: 1394 - protein, 115 aa, Artificial Sequence
  Designed; as detailed elsewhere in present application
  DISULFID (8)..(9)
RRRRRRRCCMAVTALAARTWLGVWGVRTMQARGFGSDQSENVDRGAGSIREAGGAFGKREQAEEERYFRAQSREQLAALKKHKEEEIVHHKKEIERLQKEIERHKQKIKMLKHDD

SEQ ID NO: 1395 - protein, 115 aa, Artificial Sequence
  Designed; as detailed elsewhere in present application
  DISULFID (8)..(9)
RRRRRRRCCMAVTALAARTWLGVWGVRTMQARGFGSDQSENVDRGAGAIREAGGAFGKREQAEEERYFRAQSREQLAALKKHKEEEIVHHKKEIERLQKEIERHKQKIKMLKHDD

SEQ ID NO: 1396 - protein, 129 aa, Artificial Sequence
  Designed; as detailed elsewhere in present application
  DISULFID (22)..(23)
HHHHHHDYKDDDDKRRRRRRRCCMAVTALAARTWLGVWGVRTMQARGFGSDQSENVDRGAGSIREAGGAFGKREQAEEERYFRAQSREQLAALKKHHEEEIVHHKKEIERLQKEIERHKQKIKMLKHDD

SEQ ID NO: 1397 - protein, 129 aa, Artificial Sequence
  Designed; as detailed elsewhere in present application
  DISULFID (22)..(23)
HHHHHHDYKDDDDKRRRRRRRCCMAVTALAARTWLGVWGVRTMQARGFGSDQSENVDRGAGSIREAGGAFGKREQAEEERYFRAQSREQLAALKKHKEEEIVHHKKEIERLQKEIERHKQKIKMLKHDD

SEQ ID NO: 1398 - protein, 129 aa, Artificial Sequence
  Designed; as detailed elsewhere in present application
  DISULFID (22)..(23)
HHHHHHDYKDDDDKRRRRRRRCCMAVTALAARTWLGVWGVRTMQARGFGSDQSENVDRGAGAIREAGGAFGKREQAEEERYFRAQSREQLAALKKHKEEEIVHHKKEIERLQKEIERHKQKIKMLKHDD

SEQ ID NO: 1399 - protein, 68 aa, Artificial Sequence
  Designed; as detailed elsewhere in present application
  DISULFID (8)..(9)
RRRRRRRCCMAVTALAARTWLGVWGVRTMQARGFSIREAGGAFGKREQAEEERYFRAQSREQLAALKK

SEQ ID NO: 1400 - protein, 82 aa, Artificial Sequence
  Designed; as detailed elsewhere in present application
  DISULFID (22)..(23)
HHHHHHDYKDDDDKRRRRRRRCCMAVTALAARTWLGVWGVRTMQARGFSIREAGGAFGKREQAEEERYFRAQSREQLAALKK

SEQ ID NO: 1401 - protein, 68 aa, Artificial Sequence
  Designed; as detailed elsewhere in present application
  DISULFID (8)..(9)
RRRRRRRCCMAVTALAARTWLGVWGVRTMQARGFAIREAGGAFGKREQAEEERYFRAQSREQLAALKK

SEQ ID NO: 1402 - protein, 82 aa, Artificial Sequence
  Designed; as detailed elsewhere in present application
  DISULFID (22)..(23)
HHHHHHDYKDDDDKRRRRRRRCCMAVTALAARTWLGVWGVRTMQARGFAIREAGGAFGKREQAEEERYFRAQSREQLAALKK

SEQ ID NO: 1403 - protein, 51 aa, Artificial Sequence
  Designed; as detailed elsewhere in present application
  DISULFID (8)..(9)
RRRRRRRCCMAVTALAARTWLGVWGVRTMQARGFLAALKKHHEEEIVHHKK

SEQ ID NO: 1404 - protein, 65 aa, Artificial Sequence
  Designed; as detailed elsewhere in present application
  DISULFID (22)..(23)
HHHHHHDYKDDDDKRRRRRRRCCMAVTALAARTWLGVWGVRTMQARGFLAALKKHHEEEIVHHKK

SEQ ID NO: 1405 - protein, 115 aa, Artificial Sequence
  Designed; as detailed elsewhere in present application
  DISULFID (8)..(9)
RRRRRRRCCMAVTALAARTWLGVWGVRTMQARGFGSDQSENVDRGAGAIREAGGAFGKRAQAEEERYFRAQSREQLAALKKHKEEEIVAHKKEIERLQKEIERHKQKIKMLKHDD

SEQ ID NO: 1406 - protein, 116 aa, Artificial Sequence
  Designed; as detailed elsewhere in present application
RRRRRRRCCMAVTALAARTWLGVWGVRTMQARGFGSDQSENVDRGAGAIREAGGAFGKRAQAEEERYFRAQSREQLAALKKAKEEEIVAHKKEIERLQKEIERHKQKIKKLKHDDD

SEQ ID NO: 1407 - protein, 115 aa, Artificial Sequence
  Designed; as detailed elsewhere in present application
  DISULFID (8)..(9)
RRRRRRRCCMAVTALAARTWLGVWGVRTMQARGFGSDQSENVDRGAGAIREAGGAFGKRAQAEEERYFRAQSREQLAALKKAKEEEIVAHKKEIERLQKEIERHKQKIKMLKHDD

SEQ ID NO: 1408 - protein, 129 aa, Artificial Sequence
  Designed; as detailed elsewhere in present application
  DISULFID (22)..(23)
HHHHHHDYKDDDDKRRRRRRRCCMAVTALAARTWLGVWGVRTMQARGFGSDQSENVDRGAGAIREAGGAFGKRAQAEEERYFRAQSREQLAALKKHKEEEIVAHKKEIERLQKEIERHKQKIKMLKHDD

SEQ ID NO: 1409 - protein, 130 aa, Artificial Sequence
  Designed; as detailed elsewhere in present application
  DISULFID (22)..(23)
HHHHHHDYKDDDDKRRRRRRRCCMAVTALAARTWLGVWGVRTMQARGFGSDQSENVDRGAGAIREAGGAFGKRAQAEEERYFRAQSREQLAALKKAKEEEIVAHKKEIERLQKEIERHKQKIKKLKHDDD

SEQ ID NO: 1410 - protein, 129 aa, Artificial Sequence
  Designed; as detailed elsewhere in present application
  DISULFID (22)..(23)
HHHHHHDYKDDDDKRRRRRRRCCMAVTALAARTWLGVWGVRTMQARGFGSDQSENVDRGAGAIREAGGAFGKRAQAEEERYFRAQSREQLAALKKAKEEEIVAHKKEIERLQKEIERHKQKIKMLKHDD

SEQ ID NO: 1411 - protein, 8 aa, Artificial Sequence
  Designed; as detailed elsewhere in present application
RRRRRRRC

SEQ ID NO: 1412 - protein, 107 aa, Artificial Sequence
  Designed; as detailed elsewhere in present application
  DISULFID (62)..(62): This Cys is disulfide bonded to the Cys in the following sequence: Arg Arg Arg Arg Arg Arg Arg Cys
MAVTALAARTWLGVWGVRTMQARGFGSESADNLGSSAGAIRDAGGAFGKKEQAEEERYFRACAKEQLAALKKHHENEISHHVKEIEHLQKEIERHKQSIKKLKHDDD

SEQ ID NO: 1413 - protein, 107 aa, Artificial Sequence
  Designed; as detailed elsewhere in present application
  DISULFID (87)..(87): This Cys is disulfide bonded to the Cys in the following sequence: Arg Arg Arg Arg Arg Arg Arg Cys
MAVTALAARTWLGVWGVRTMQARGFGSESADNLGSSAGAIRDAGGAFGKKEQAEEERYFRARAKEQLAALKKHHENEISHHVKEIECLQKEIERHKQSIKKLKHDDD

SEQ ID NO: 1414 - protein, 107 aa, Artificial Sequence
  Designed; as detailed elsewhere in present application
  DISULFID (62)..(62): This Cys is disulfide bonded to the Cys in the following sequence: Arg Arg Arg Arg Arg Arg Arg Cys
  DISULFID (87)..(87): This Cys is disulfide bonded to the Cys in the following sequence: Arg Arg Arg Arg Arg Arg Arg Cys
MAVTALAARTWLGVWGVRTMQARGFGSESADNLGSSAGAIRDAGGAFGKKEQAEEERYFRACAKEQLAALKKHHENEISHHVKEIECLQKEIERHKQSIKKLKHDDD

SEQ ID NO: 1415 - protein, 107 aa, Artificial Sequence
  Designed; as detailed elsewhere in present application
  DISULFID (62)..(62): This Cys is disulfide bonded to the Cys in the following sequence: Arg Arg Arg Arg Arg Arg Arg Cys
MAVTALAARTWLGVWGVRTMQARGFGSESADNLGSSAGAIRDAGGAFGKKEQAEEERYFRACAKEQLAALKKHKENEISHHVKEIEHLQKEIERHKQSIKKLKHDDD

SEQ ID NO: 1416 - protein, 107 aa, Artificial Sequence
  Designed; as detailed elsewhere in present application
  DISULFID (87)..(87): This Cys is disulfide bonded to the Cys in the following sequence: Arg Arg Arg Arg Arg Arg Arg Cys
MAVTALAARTWLGVWGVRTMQARGFGSESADNLGSSAGAIRDAGGAFGKKEQAEEERYFRARAKEQLAALKKHKENEISHHVKEIECLQKEIERHKQSIKKLKHDDD

SEQ ID NO: 1417 - protein, 107 aa, Artificial Sequence
  Designed; as detailed elsewhere in present application
  DISULFID (62)..(62): This Cys is disulfide bonded to the Cys in the following sequence: Arg Arg Arg Arg Arg Arg Arg Cys
  DISULFID (87)..(87): This Cys is disulfide bonded to the Cys in the following sequence: Arg Arg Arg Arg Arg Arg Arg Cys
MAVTALAARTWLGVWGVRTMQARGFGSESADNLGSSAGAIRDAGGAFGKKEQAEEERYFRACAKEQLAALKKHKENEISHHVKEIECLQKEIERHKQSIKKLKHDDD

SEQ ID NO: 1418 - protein, 26 aa, Apis mellifera
QQRKRKIWSILAPLGTTLVKLVAGIG

SEQ ID NO: 1419 - protein, 25 aa, Artificial Sequence
  Synthetic fragment
LLYRSSCLTRTAPKFFRISQRLSLM

SEQ ID NO: 1420 - protein, 23 aa, Artificial Sequence
  Synthetic fragment
LLYRSSCLTRTAPFRISQRLSLM

SEQ ID NO: 1421 - protein, 23 aa, Artificial Sequence
  Synthetic fragment
LLYRSLLRLSLRSLLRLSLRSLM

SEQ ID NO: 1422 - protein, 23 aa, Artificial Sequence
  Synthetic fragment
LLYRSLRLRLLSLSRLRLLSSLM

SEQ ID NO: 1423 - protein, 25 aa, Artificial Sequence
  Synthetic fragment
FVKRERATEDFFVRQREKEQLRHLK

SEQ ID NO: 1424 - protein, 25 aa, Artificial Sequence
  Synthetic fragment
FEKREKAQEDLYIRQHEKEQLEALK

SEQ ID NO: 1425 - protein, 20 aa, Artificial Sequence
  Synthetic fragment
DELSEEDKLTVSRARKIQRF

SEQ ID NO: 1426 - DNA, 387 bp, Artificial Sequence
  Designed; as detailed elsewhere in present application
  CDS (1)..(387)
catcatcatcatcatcatgattataaagatgatgatgataaacgtcgtcgtcgtcgtcgtcgtggtatggcagttaccgcactggcagcacgtacctggctgggtgtttggggtgttcgtaccatgcaggcacgtggttttggtagcgaaagcgcagataatctgggtagcagcgcaggtgcaattcgtgatgcaggtggtgcatttggtaaaaaagaacaggcagaagaagaacgttattttcgtgcacgtgcaaaagaacagctggcagcactgaaaaaacatcatgaaaatgaaattagccatcatgttaaagaaattgaacatctgcagaaagaaattgaacgtcataaacagagcattaaaaaactgaaacatgatgatgat

SEQ ID NO: 1427 - DNA, 387 bp, Artificial Sequence
  Designed; as detailed elsewhere in present application
  CDS (1)..(387)
catcatcatcatcatcatgattataaagatgatgatgataaaagaagaagaagaagaagaagaggtatggctgttactgctttggctgctagaacttggttgggtgtttggggtgttagaactatgcaagctagaggttttggttctgaatctgctgataatttgggttcttctgctggtgctattagagatgctggtggtgcttttggtaaaaaagaacaagctgaagaagaaagatattttagagctagagctaaagaacaattggctgctttgaaaaaacatcatgaaaatgaaatttctcatcatgttaaagaaattgaacatttgcaaaaagaaattgaaagacataaacaatctattaaaaaattgaaacatgatgatgat

SEQ ID NO: 1428 - DNA, 387 bp, Artificial Sequence
  Designed; as detailed elsewhere in present application
  CDS (1)..(387)
caccaccaccaccaccacgactacaaggacgacgacgacaagagaagaagaagaagaagaagaggcatggccgtgaccgccctggccgccagaacctggctgggcgtgtggggcgtgagaaccatgcaggccagaggcttcggcagcgagagcgccgacaacctgggcagcagcgccggcgccatcagagacgccggcggcgccttcggcaagaaggagcaggccgaggaggagagatacttcagagccagagccaaggagcagctggccgccctgaagaagcaccacgagaacgagatcagccaccacgtgaaggagatcgagcacctgcagaaggagatcgagagacacaagcagagcatcaagaagctgaagcacgacgacgac

SEQ ID NO: 1429 - DNA, 321 bp, Artificial Sequence
  Designed; as detailed elsewhere in present application
  CDS (1)..(321)
catcatcatcatcatcatgattataaagatgatgatgataaacgtcgtcgtcgtcgtcgtcgtggtatggcagttaccgcactggcagcacgtacctggctgggtgtttggggtgttcgtaccatgcaggcacgtggttttggtagcgaaagcgcagataatctgggtagcagcgcaggtgcaattcgtgatgcaggtggtgcatttggtaaaaaagaacaggcagaagaagaacgttattttcgtgcacgtgcaaaagaacagctggcagcactgaaaaaacatcatgaaaatgaaattagccatcatgttaaagaaatt

SEQ ID NO: 1430 - DNA, 321 bp, Artificial Sequence
  Designed; as detailed elsewhere in present application
catcatcatcatcatcatgattataaagatgatgatgataaaagaagaagaagaagaagaagaggtatggctgttactgctttggctgctagaacttggttgggtgtttggggtgttagaactatgcaagctagaggttttggttctgaatctgctgataatttgggttcttctgctggtgctattagagatgctggtggtgcttttggtaaaaaagaacaagctgaagaagaaagatattttagagctagagctaaagaacaattggctgctttgaaaaaacatcatgaaaatgaaatttctcatcatgttaaagaaatt

SEQ ID NO: 1431 - DNA, 321 bp, Artificial Sequence
  Designed; as detailed elsewhere in present application
caccaccaccaccaccacgactacaaggacgacgacgacaagagaagaagaagaagaagaagaggcatggccgtgaccgccctggccgccagaacctggctgggcgtgtggggcgtgagaaccatgcaggccagaggcttcggcagcgagagcgccgacaacctgggcagcagcgccggcgccatcagagacgccggcggcgccttcggcaagaaggagcaggccgaggaggagagatacttcagagccagagccaaggagcagctggccgccctgaagaagcaccacgagaacgagatcagccaccacgtgaaggagatc

SEQ ID NO: 1432 - DNA, 294 bp, Artificial Sequence
  Designed; as detailed elsewhere in present application
  CDS (1)..(294)
catcatcatcatcatcatgattataaagatgatgatgataaacgtcgtcgtcgtcgtcgtcgtggtatggcagttaccgcactggcagcacgtacctggctgggtgtttggggtgttcgtaccatgcaggcacgtggttttagcagcgcaggtgcaattcgtgatgcaggtggtgcatttggtaaaaaagaacaggcagaagaagaacgttattttcgtgcacgtgcaaaagaacagctggcagcactgaaaaaacatcatgaaaatgaaattagccatcatgttaaagaaatt

SEQ ID NO: 1433 - DNA, 294 bp, Artificial Sequence
  Designed; as detailed elsewhere in present application
  CDS (1)..(294)
catcatcatcatcatcatgattataaagatgatgatgataaaagaagaagaagaagaagaagaggtatggctgttactgctttggctgctagaacttggttgggtgtttggggtgttagaactatgcaagctagaggtttttcttctgctggtgctattagagatgctggtggtgcttttggtaaaaaagaacaagctgaagaagaaagatattttagagctagagctaaagaacaattggctgctttgaaaaaacatcatgaaaatgaaatttctcatcatgttaaagaaatt

SEQ ID NO: 1434 - DNA, 294 bp, Artificial Sequence
  Designed; as detailed elsewhere in present application
  CDS (1)..(294)
caccaccaccaccaccacgactacaaggacgacgacgacaagagaagaagaagaagaagaagaggcatggccgtgaccgccctggccgccagaacctggctgggcgtgtggggcgtgagaaccatgcaggccagaggcttcagcagcgccggcgccatcagagacgccggcggcgccttcggcaagaaggagcaggccgaggaggagagatacttcagagccagagccaaggagcagctggccgccctgaagaagcaccacgagaacgagatcagccaccacgtgaaggagatc

SEQ ID NO: 1435 - DNA, 282 bp, Artificial Sequence
  Designed; as detailed elsewhere in present application
  CDS (1)..(282)
catcatcatcatcatcatgattataaagatgatgatgataaacgtcgtcgtcgtcgtcgtcgtggtatggcagttaccgcactggcagcacgtacctggctgggtgtttggggtgttcgtaccatgcaggcacgtggttttgcaattcgtgatgcaggtggtgcatttggtaaaaaagaacaggcagaagaagaacgttattttcgtgcacgtgcaaaagaacagctggcagcactgaaaaaacatcatgaaaatgaaattagccatcatgttaaagaaatt

SEQ ID NO: 1436 - DNA, 282 bp, Artificial Sequence
  Designed; as detailed elsewhere in present application
catcatcatcatcatcatgattataaagatgatgatgataaaagaagaagaagaagaagaagaggtatggctgttactgctttggctgctagaacttggttgggtgtttggggtgttagaactatgcaagctagaggttttgctattagagatgctggtggtgcttttggtaaaaaagaacaagctgaagaagaaagatattttagagctagagctaaagaacaattggctgctttgaaaaaacatcatgaaaatgaaatttctcatcatgttaaagaaatt

SEQ ID NO: 1437 - DNA, 282 bp, Artificial Sequence
  Designed; as detailed elsewhere in present application
  CDS (1)..(282)
caccaccaccaccaccacgactacaaggacgacgacgacaagagaagaagaagaagaagaagaggcatggccgtgaccgccctggccgccagaacctggctgggcgtgtggggcgtgagaaccatgcaggccagaggcttcgccatcagagacgccggcggcgccttcggcaagaaggagcaggccgaggaggagagatacttcagagccagagccaaggagcagctggccgccctgaagaagcaccacgagaacgagatcagccaccacgtgaaggagatc

SEQ ID NO: 1438 - DNA, 246 bp, Artificial Sequence
  Designed; as detailed elsewhere in present application
  CDS (1)..(246)
catcatcatcatcatcatgattataaagatgatgatgataaacgtcgtcgtcgtcgtcgtcgtggtatggcagttaccgcactggcagcacgtacctggctgggtgtttggggtgttcgtaccatgcaggcacgtggttttggtgcaattcgtgatgcaggtggtgcatttggtaaaaaagaacaggcagaagaagaacgttattttcgtgcacgtgcaaaagaacagctggcagcactgaaaaaa

SEQ ID NO: 1439 - DNA, 246 bp, Artificial Sequence
  Designed; as detailed elsewhere in present application
  CDS (1)..(246)
catcatcatcatcatcatgattataaagatgatgatgataaaagaagaagaagaagaagaagaggtatggctgttactgctttggctgctagaacttggttgggtgtttggggtgttagaactatgcaagctagaggttttggtgctattagagatgctggtggtgcttttggtaaaaaagaacaagctgaagaagaaagatattttagagctagagctaaagaacaattggctgctttgaaaaaa

SEQ ID NO: 1440 - DNA, 246 bp, Artificial Sequence
  Designed; as detailed elsewhere in present application
  CDS (1)..(246)
caccaccaccaccaccacgactacaaggacgacgacgacaagagaagaagaagaagaagaagaggcatggccgtgaccgccctggccgccagaacctggctgggcgtgtggggcgtgagaaccatgcaggccagaggcttcggcgccatcagagacgccggcggcgccttcggcaagaaggagcaggccgaggaggagagatacttcagagccagagccaaggagcagctggccgccctgaagaag

SEQ ID NO: 1441 - DNA, 243 bp, Artificial Sequence
  Designed; as detailed elsewhere in present application
  CDS (1)..(243)
catcatcatcatcatcatgattataaagatgatgatgataaacgtcgtcgtcgtcgtcgtcgtggtatggcagttaccgcactggcagcacgtacctggctgggtgtttggggtgttcgtaccatgcaggcacgtggttttgcaattcgtgatgcaggtggtgcatttggtaaaaaagaacaggcagaagaagaacgttattttcgtgcacgtgcaaaagaacagctggcagcactgaaaaaa

SEQ ID NO: 1442 - DNA, 243 bp, Artificial Sequence
  Designed; as detailed elsewhere in present application
  CDS (1)..(243)
catcatcatcatcatcatgattataaagatgatgatgataaaagaagaagaagaagaagaagaggtatggctgttactgctttggctgctagaacttggttgggtgtttggggtgttagaactatgcaagctagaggttttgctattagagatgctggtggtgcttttggtaaaaaagaacaagctgaagaagaaagatattttagagctagagctaaagaacaattggctgctttgaaaaaa

SEQ ID NO: 1443 - DNA, 243 bp, Artificial Sequence
  Designed; as detailed elsewhere in present application
  CDS (1)..(243)
caccaccaccaccaccacgactacaaggacgacgacgacaagagaagaagaagaagaagaagaggcatggccgtgaccgccctggccgccagaacctggctgggcgtgtggggcgtgagaaccatgcaggccagaggcttcgccatcagagacgccggcggcgccttcggcaagaaggagcaggccgaggaggagagatacttcagagccagagccaaggagcagctggccgccctgaagaag

SEQ ID NO: 1444 - DNA, 192 bp, Artificial Sequence
  Designed; as detailed elsewhere in present application
  CDS (1)..(192)
catcatcatcatcatcatgattataaagatgatgatgataaacgtcgtcgtcgtcgtcgtcgtggtatggcagttaccgcactggcagcacgtacctggctgggtgtttggggtgttcgtaccatgcaggcacgtggttttctggcagcactgaaaaaacatcatgaaaatgaaattagccatcatgttaaa

SEQ ID NO: 1445 - DNA, 192 bp, Artificial Sequence
  Designed; as detailed elsewhere in present application
  CDS (1)..(192)
catcatcatcatcatcatgattataaagatgatgatgataaaagaagaagaagaagaagaagaggtatggctgttactgctttggctgctagaacttggttgggtgtttggggtgttagaactatgcaagctagaggttttttggctgctttgaaaaaacatcatgaaaatgaaatttctcatcatgttaaa

SEQ ID NO: 1446 - DNA, 192 bp, Artificial Sequence
  Designed; as detailed elsewhere in present application
  CDS (1)..(192)
caccaccaccaccaccacgactacaaggacgacgacgacaagagaagaagaagaagaagaagaggcatggccgtgaccgccctggccgccagaacctggctgggcgtgtggggcgtgagaaccatgcaggccagaggcttcctggccgccctgaagaagcaccacgagaacgagatcagccaccacgtgaag

SEQ ID NO: 1447 - DNA, 387 bp, Artificial Sequence
  Designed; as detailed elsewhere in present application
  CDS (1)..(387)
catcatcatcatcatcatgattataaagatgatgatgataaacgtcgtcgtcgtcgtcgtcgtggtatggcagttaccgcactggcagcacgtacctggctgggtgtttggggtgttcgtaccatgcaggcacgtggttttggtagcgaaccggcagataatctgggtagcagcgaagcaaccgtttggaatgcaggtgttgattttcgtaaacgtgaacaggcaaaaggtgaacgttatctgcgtgcacgtgcaaaagaacagctggcagcactgaaaaaacatcatgaaaatgaaattagccatcatgttaaagaaattgaacatctgcagaaagaaattgaacgtcataaacagagcattaaaaaactgaaacatgatgatgat

SEQ ID NO: 1448 - DNA, 387 bp, Artificial Sequence
  Designed; as detailed elsewhere in present application
  CDS (1)..(387)
catcatcatcatcatcatgattataaagatgatgatgataaaagaagaagaagaagaagaagaggtatggctgttactgctttggctgctagaacttggttgggtgtttggggtgttagaactatgcaagctagaggttttggttctgaaccagctgataatttgggttcttctgaagctactgtttggaatgctggtgttgattttagaaaaagagaacaagctaaaggtgaaagatatttgagagctagagctaaagaacaattggctgctttgaaaaaacatcatgaaaatgaaatttctcatcatgttaaagaaattgaacatttgcaaaaagaaattgaaagacataaacaatctattaaaaaattgaaacatgatgatgat

SEQ ID NO: 1449 - DNA, 387 bp, Artificial Sequence
  Designed; as detailed elsewhere in present application
  CDS (1)..(387)
caccaccaccaccaccacgactacaaggacgacgacgacaagagaagaagaagaagaagaagaggcatggccgtgaccgccctggccgccagaacctggctgggcgtgtggggcgtgagaaccatgcaggccagaggcttcggcagcgagcccgccgacaacctgggcagcagcgaggccaccgtgtggaacgccggcgtggacttcagaaagagagagcaggccaagggcgagagatacctgagagccagagccaaggagcagctggccgccctgaagaagcaccacgagaacgagatcagccaccacgtgaaggagatcgagcacctgcagaaggagatcgagagacacaagcagagcatcaagaagctgaagcacgacgacgac

SEQ ID NO: 1450 - DNA, 321 bp, Artificial Sequence
  Designed; as detailed elsewhere in present application
  CDS (1)..(321)
catcatcatcatcatcatgattataaagatgatgatgataaacgtcgtcgtcgtcgtcgtcgtggtatggcagttaccgcactggcagcacgtacctggctgggtgtttggggtgttcgtaccatgcaggcacgtggttttggtagcgaaccggcagataatctgggtagcagcgaagcaaccgtttggaatgcaggtgttgattttcgtaaacgtgaacaggcaaaaggtgaacgttatctgcgtgcacgtgcaaaagaacagctggcagcactgaaaaaacatcatgaaaatgaaattagccatcatgttaaagaaatt

SEQ ID NO: 1451 - DNA, 321 bp, Artificial Sequence
  Designed; as detailed elsewhere in present application
  CDS (1)..(321)
catcatcatcatcatcatgattataaagatgatgatgataaaagaagaagaagaagaagaagaggtatggctgttactgctttggctgctagaacttggttgggtgtttggggtgttagaactatgcaagctagaggttttggttctgaaccagctgataatttgggttcttctgaagctactgtttggaatgctggtgttgattttagaaaaagagaacaagctaaaggtgaaagatatttgagagctagagctaaagaacaattggctgctttgaaaaaacatcatgaaaatgaaatttctcatcatgttaaagaaatt

SEQ ID NO: 1452 - DNA, 321 bp, Artificial Sequence
  Designed; as detailed elsewhere in present application
  CDS (1)..(321)
caccaccaccaccaccacgactacaaggacgacgacgacaagagaagaagaagaagaagaagaggcatggccgtgaccgccctggccgccagaacctggctgggcgtgtggggcgtgagaaccatgcaggccagaggcttcggcagcgagcccgccgacaacctgggcagcagcgaggccaccgtgtggaacgccggcgtggacttcagaaagagagagcaggccaagggcgagagatacctgagagccagagccaaggagcagctggccgccctgaagaagcaccacgagaacgagatcagccaccacgtgaaggagatc

SEQ ID NO: 1453 - DNA, 294 bp, Artificial Sequence
  Designed; as detailed elsewhere in present application
  CDS (1)..(294)
catcatcatcatcatcatgattataaagatgatgatgataaacgtcgtcgtcgtcgtcgtcgtggtatggcagttaccgcactggcagcacgtacctggctgggtgtttggggtgttcgtaccatgcaggcacgtggttttagcagcgaagcaaccgtttggaatgcaggtgttgattttcgtaaacgtgaacaggcaaaaggtgaacgttatctgcgtgcacgtgcaaaagaacagctggcagcactgaaaaaacatcatgaaaatgaaattagccatcatgttaaagaaatt

SEQ ID NO: 1454 - DNA, 294 bp, Artificial Sequence
  Designed; as detailed elsewhere in present application
  CDS (1)..(294)
catcatcatcatcatcatgattataaagatgatgatgataaaagaagaagaagaagaagaagaggtatggctgttactgctttggctgctagaacttggttgggtgtttggggtgttagaactatgcaagctagaggtttttcttctgaagctactgtttggaatgctggtgttgattttagaaaaagagaacaagctaaaggtgaaagatatttgagagctagagctaaagaacaattggctgctttgaaaaaacatcatgaaaatgaaatttctcatcatgttaaagaaatt

SEQ ID NO: 1455 - DNA, 294 bp, Artificial Sequence
  Designed; as detailed elsewhere in present application
  CDS (1)..(294)
caccaccaccaccaccacgactacaaggacgacgacgacaagagaagaagaagaagaagaagaggcatggccgtgaccgccctggccgccagaacctggctgggcgtgtggggcgtgagaaccatgcaggccagaggcttcagcagcgaggccaccgtgtggaacgccggcgtggacttcagaaagagagagcaggccaagggcgagagatacctgagagccagagccaaggagcagctggccgccctgaagaagcaccacgagaacgagatcagccaccacgtgaaggagatc

SEQ ID NO: 1456 - DNA, 282 bp, Artificial Sequence
  Designed; as detailed elsewhere in present application
  CDS (1)..(282)
catcatcatcatcatcatgattataaagatgatgatgataaacgtcgtcgtcgtcgtcgtcgtggtatggcagttaccgcactggcagcacgtacctggctgggtgtttggggtgttcgtaccatgcaggcacgtggttttaccgtttggaatgcaggtgttgattttcgtaaacgtgaacaggcaaaaggtgaacgttatctgcgtgcacgtgcaaaagaacagctggcagcactgaaaaaacatcatgaaaatgaaattagccatcatgttaaagaaatt

SEQ ID NO: 1457 - DNA, 282 bp, Artificial Sequence
  Designed; as detailed elsewhere in present application
  CDS (1)..(282)
catcatcatcatcatcatgattataaagatgatgatgataaaagaagaagaagaagaagaagaggtatggctgttactgctttggctgctagaacttggttgggtgtttggggtgttagaactatgcaagctagaggttttactgtttggaatgctggtgttgattttagaaaaagagaacaagctaaaggtgaaagatatttgagagctagagctaaagaacaattggctgctttgaaaaaacatcatgaaaatgaaatttctcatcatgttaaagaaatt

SEQ ID NO: 1458 - DNA, 282 bp, Artificial Sequence
  Designed; as detailed elsewhere in present application
  CDS (1)..(282)
caccaccaccaccaccacgactacaaggacgacgacgacaagagaagaagaagaagaagaagaggcatggccgtgaccgccctggccgccagaacctggctgggcgtgtggggcgtgagaaccatgcaggccagaggcttcaccgtgtggaacgccggcgtggacttcagaaagagagagcaggccaagggcgagagatacctgagagccagagccaaggagcagctggccgccctgaagaagcaccacgagaacgagatcagccaccacgtgaaggagatc

SEQ ID NO: 1459 - DNA, 246 bp, Artificial Sequence
  Designed; as detailed elsewhere in present application
  CDS (1)..(246)
catcatcatcatcatcatgattataaagatgatgatgataaacgtcgtcgtcgtcgtcgtcgtggtatggcagttaccgcactggcagcacgtacctggctgggtgtttggggtgttcgtaccatgcaggcacgtggttttgcaaccgtttggaatgcaggtgttgattttcgtaaacgtgaacaggcaaaaggtgaacgttatctgcgtgcacgtgcaaaagaacagctggcagcactgaaaaaa

SEQ ID NO: 1460 - DNA, 246 bp, Artificial Sequence
  Designed; as detailed elsewhere in present application
  CDS (1)..(246)
catcatcatcatcatcatgattataaagatgatgatgataaaagaagaagaagaagaagaagaggtatggctgttactgctttggctgctagaacttggttgggtgtttggggtgttagaactatgcaagctagaggttttgctactgtttggaatgctggtgttgattttagaaaaagagaacaagctaaaggtgaaagatatttgagagctagagctaaagaacaattggctgctttgaaaaaa

SEQ ID NO: 1461 - DNA, 246 bp, Artificial Sequence
  Designed; as detailed elsewhere in present application
  CDS (1)..(246)
caccaccaccaccaccacgactacaaggacgacgacgacaagagaagaagaagaagaagaagaggcatggccgtgaccgccctggccgccagaacctggctgggcgtgtggggcgtgagaaccatgcaggccagaggcttcgccaccgtgtggaacgccggcgtggacttcagaaagagagagcaggccaagggcgagagatacctgagagccagagccaaggagcagctggccgccctgaagaag

SEQ ID NO: 1462 - DNA, 243 bp, Artificial Sequence
  Designed; as detailed elsewhere in present application
  CDS (1)..(243)
catcatcatcatcatcatgattataaagatgatgatgataaacgtcgtcgtcgtcgtcgtcgtggtatggcagttaccgcactggcagcacgtacctggctgggtgtttggggtgttcgtaccatgcaggcacgtggttttaccgtttggaatgcaggtgttgattttcgtaaacgtgaacaggcaaaaggtgaacgttatctgcgtgcacgtgcaaaagaacagctggcagcactgaaaaaa

SEQ ID NO: 1463 - DNA, 243 bp, Artificial Sequence
  Designed; as detailed elsewhere in present application
  CDS (1)..(243)
catcatcatcatcatcatgattataaagatgatgatgataaaagaagaagaagaagaagaagaggtatggctgttactgctttggctgctagaacttggttgggtgtttggggtgttagaactatgcaagctagaggttttactgtttggaatgctggtgttgattttagaaaaagagaacaagctaaaggtgaaagatatttgagagctagagctaaagaacaattggctgctttgaaaaaa

SEQ ID NO: 1464 - DNA, 243 bp, Artificial Sequence
  Designed; as detailed elsewhere in present application
  CDS (1)..(243)
caccaccaccaccaccacgactacaaggacgacgacgacaagagaagaagaagaagaagaagaggcatggccgtgaccgccctggccgccagaacctggctgggcgtgtggggcgtgagaaccatgcaggccagaggcttcaccgtgtggaacgccggcgtggacttcagaaagagagagcaggccaagggcgagagatacctgagagccagagccaaggagcagctggccgccctgaagaag

SEQ ID NO: 1465 - DNA, 192 bp, Artificial Sequence; identical to SEQ ID NO: 1444
  Designed; as detailed elsewhere in present application
  CDS (1)..(192)

SEQ ID NO: 1466 - DNA, 192 bp, Artificial Sequence; identical to SEQ ID NO: 1445
  Designed; as detailed elsewhere in present application
  CDS (1)..(192)

SEQ ID NO: 1467 - DNA, 192 bp, Artificial Sequence; identical to SEQ ID NO: 1446
  Designed; as detailed elsewhere in present application
  CDS (1)..(192)

SEQ ID NO: 1468 - DNA, 384 bp, Artificial Sequence
  Designed; as detailed elsewhere in present application
  CDS (1)..(384)
catcatcatcatcatcatgattataaagatgatgatgataaacgtcgtcgtcgtcgtcgtcgtggtatggcagttaccgcactggcagcacgtacctggctgggtgtttggggtgttcgtaccatgcaggcacgtggttttggtagcgatcagagcgaaaatgttgatcgtggtgcaggtagcattcgtgaagcaggtggtgcatttggtaaacgtgaacaggcagaagaagaacgttattttcgtgcacagagccgtgaacagctggcagcactgaaaaaacatcatgaagaagaaattgttcatcataaaaaagaaattgaacgtctgcagaaagaaattgaacgtcataaacagaaaattaaaatgctgaaacatgatgat

SEQ ID NO: 1469 - DNA, 384 bp, Artificial Sequence
  Designed; as detailed elsewhere in present application
  CDS (1)..(384)
catcatcatcatcatcatgattataaagatgatgatgataaaagaagaagaagaagaagaagaggtatggctgttactgctttggctgctagaacttggttgggtgtttggggtgttagaactatgcaagctagaggttttggttctgatcaatctgaaaatgttgatagaggtgctggttctattagagaagctggtggtgcttttggtaaaagagaacaagctgaagaagaaagatattttagagctcaatctagagaacaattggctgctttgaaaaaacatcatgaagaagaaattgttcatcataaaaaagaaattgaaagattgcaaaaagaaattgaaagacataaacaaaaaattaaaatgttgaaacatgatgat

SEQ ID NO: 1470 - DNA, 384 bp, Artificial Sequence
  Designed; as detailed elsewhere in present application
  CDS (1)..(384)
caccaccaccaccaccacgactacaaggacgacgacgacaagagaagaagaagaagaagaagaggcatggccgtgaccgccctggccgccagaacctggctgggcgtgtggggcgtgagaaccatgcaggccagaggcttcggcagcgaccagagcgagaacgtggacagaggcgccggcagcatcagagaggccggcggcgccttcggcaagagagagcaggccgaggaggagagatacttcagagcccagagcagagagcagctggccgccctgaagaagcaccacgaggaggagatcgtgcaccacaagaaggagatcgagagactgcagaaggagatcgagagacacaagcagaagatcaagatgctgaagcacgacgac

SEQ ID NO: 1471 - DNA, 321 bp, Artificial Sequence
  Designed; as detailed elsewhere in present application
  CDS (1)..(321)
catcatcatcatcatcatgattataaagatgatgatgataaacgtcgtcgtcgtcgtcgtcgtggtatggcagttaccgcactggcagcacgtacctggctgggtgtttggggtgttcgtaccatgcaggcacgtggttttggtagcgatcagagcgaaaatgttgatcgtggtgcaggtagcattcgtgaagcaggtggtgcatttggtaaacgtgaacaggcagaagaagaacgttattttcgtgcacagagccgtgaacagctggcagcactgaaaaaacatcatgaagaagaaattgttcatcataaaaaagaaatt

SEQ ID NO: 1472 - DNA, 321 bp, Artificial Sequence
  Designed; as detailed elsewhere in present application
  CDS (1)..(321)
catcatcatcatcatcatgattataaagatgatgatgataaaagaagaagaagaagaagaagaggtatggctgttactgctttggctgctagaacttggttgggtgtttggggtgttagaactatgcaagctagaggttttggttctgatcaatctgaaaatgttgatagaggtgctggttctattagagaagctggtggtgcttttggtaaaagagaacaagctgaagaagaaagatattttagagctcaatctagagaacaattggctgctttgaaaaaacatcatgaagaagaaattgttcatcataaaaaagaaatt

SEQ ID NO: 1473 - DNA, 321 bp, Artificial Sequence
  Designed; as detailed elsewhere in present application
  CDS (1)..(321)
caccaccaccaccaccacgactacaaggacgacgacgacaagagaagaagaagaagaagaagaggcatggccgtgaccgccctggccgccagaacctggctgggcgtgtggggcgtgagaaccatgcaggccagaggcttcggcagcgaccagagcgagaacgtggacagaggcgccggcagcatcagagaggccggcggcgccttcggcaagagagagcaggccgaggaggagagatacttcagagcccagagcagagagcagctggccgccctgaagaagcaccacgaggaggagatcgtgcaccacaagaaggagatc

SEQ ID NO: 1474 - DNA, 294 bp, Artificial Sequence
  Designed; as detailed elsewhere in present application
  CDS (1)..(294)
catcatcatcatcatcatgattataaagatgatgatgataaacgtcgtcgtcgtcgtcgtcgtggtatggcagttaccgcactggcagcacgtacctggctgggtgtttggggtgttcgtaccatgcaggcacgtggttttcgtggtgcaggtagcattcgtgaagcaggtggtgcatttggtaaacgtgaacaggcagaagaagaacgttattttcgtgcacagagccgtgaacagctggcagcactgaaaaaacatcatgaagaagaaattgttcatcataaaaaagaaatt

SEQ ID NO: 1475 - DNA, 294 bp, Artificial Sequence
  Designed; as detailed elsewhere in present application
  CDS (1)..(294)
catcatcatcatcatcatgattataaagatgatgatgataaaagaagaagaagaagaagaagaggtatggctgttactgctttggctgctagaacttggttgggtgtttggggtgttagaactatgcaagctagaggttttagaggtgctggttctattagagaagctggtggtgcttttggtaaaagagaacaagctgaagaagaaagatattttagagctcaatctagagaacaattggctgctttgaaaaaacatcatgaagaagaaattgttcatcataaaaaagaaatt

SEQ ID NO: 1476 - DNA, 294 bp, Artificial Sequence
  Designed; as detailed elsewhere in present application
  CDS (1)..(294)
caccaccaccaccaccacgactacaaggacgacgacgacaagagaagaagaagaagaagaagaggcatggccgtgaccgccctggccgccagaacctggctgggcgtgtggggcgtgagaaccatgcaggccagaggcttcagaggcgccggcagcatcagagaggccggcggcgccttcggcaagagagagcaggccgaggaggagagatacttcagagcccagagcagagagcagctggccgccctgaagaagcaccacgaggaggagatcgtgcaccacaagaaggagatc

SEQ ID NO: 1477 - DNA, 282 bp, Artificial Sequence
  Designed; as detailed elsewhere in present application
  CDS (1)..(282)
catcatcatcatcatcatgattataaagatgatgatgataaacgtcgtcgtcgtcgtcgtcgtggtatggcagttaccgcactggcagcacgtacctggctgggtgtttggggtgttcgtaccatgcaggcacgtggttttagcattcgtgaagcaggtggtgcatttggtaaacgtgaacaggcagaagaagaacgttattttcgtgcacagagccgtgaacagctggcagcactgaaaaaacatcatgaagaagaaattgttcatcataaaaaagaaatt

SEQ ID NO: 1478 - DNA, 282 bp, Artificial Sequence
  Designed; as detailed elsewhere in present application
  CDS (1)..(282)
catcatcatcatcatcatgattataaagatgatgatgataaaagaagaagaagaagaagaagaggtatggctgttactgctttggctgctagaacttggttgggtgtttggggtgttagaactatgcaagctagaggtttttctattagagaagctggtggtgcttttggtaaaagagaacaagctgaagaagaaagatattttagagctcaatctagagaacaattggctgctttgaaaaaacatcatgaagaagaaattgttcatcataaaaaagaaatt

SEQ ID NO: 1479 - DNA, 282 bp, Artificial Sequence
  Designed; as detailed elsewhere in present application
  CDS (1)..(282)
caccaccaccaccaccacgactacaaggacgacgacgacaagagaagaagaagaagaagaagaggcatggccgtgaccgccctggccgccagaacctggctgggcgtgtggggcgtgagaaccatgcaggccagaggcttcagcatcagagaggccggcggcgccttcggcaagagagagcaggccgaggaggagagatacttcagagcccagagcagagagcagctggccgccctgaagaagcaccacgaggaggagatcgtgcaccacaagaaggagatc

SEQ ID NO: 1480 - DNA, 246 bp, Artificial Sequence
  Designed; as detailed elsewhere in present application
  CDS (1)..(246)
catcatcatcatcatcatgattataaagatgatgatgataaacgtcgtcgtcgtcgtcgtcgtggtatggcagttaccgcactggcagcacgtacctggctgggtgtttggggtgttcgtaccatgcaggcacgtggttttggtagcattcgtgaagcaggtggtgcatttggtaaacgtgaacaggcagaagaagaacgttattttcgtgcacagagccgtgaacagctggcagcactgaaaaaa

SEQ ID NO: 1481 - DNA, 246 bp, Artificial Sequence
  Designed; as detailed elsewhere in present application
  CDS (1)..(246)
catcatcatcatcatcatgattataaagatgatgatgataaaagaagaagaagaagaagaagaggtatggctgttactgctttggctgctagaacttggttgggtgtttggggtgttagaactatgcaagctagaggttttggttctattagagaagctggtggtgcttttggtaaaagagaacaagctgaagaagaaagatattttagagctcaatctagagaacaattggctgctttgaaaaaa

SEQ ID NO: 1482 - DNA, 246 bp, Artificial Sequence
  Designed; as detailed elsewhere in present application
  CDS (1)..(246)
caccaccaccaccaccacgactacaaggacgacgacgacaagagaagaagaagaagaagaagaggcatggccgtgaccgccctggccgccagaacctggctgggcgtgtggggcgtgagaaccatgcaggccagaggcttcggcagcatcagagaggccggcggcgccttcggcaagagagagcaggccgaggaggagagatacttcagagcccagagcagagagcagctggccgccctgaagaag

SEQ ID NO: 1483 - DNA, 243 bp, Artificial Sequence
  Designed; as detailed elsewhere in present application
  CDS (1)..(243)
catcatcatcatcatcatgattataaagatgatgatgataaacgtcgtcgtcgtcgtcgtcgtggtatggcagttaccgcactggcagcacgtacctggctgggtgtttggggtgttcgtaccatgcaggcacgtggttttagcattcgtgaagcaggtggtgcatttggtaaacgtgaacaggcagaagaagaacgttattttcgtgcacagagccgtgaacagctggcagcactgaaaaaa

SEQ ID NO: 1484 - DNA, 243 bp, Artificial Sequence
  Designed; as detailed elsewhere in present application
  CDS (1)..(243)
catcatcatcatcatcatgattataaagatgatgatgataaaagaagaagaagaagaagaagaggtatggctgttactgctttggctgctagaacttggttgggtgtttggggtgttagaactatgcaagctagaggtttttctattagagaagctggtggtgcttttggtaaaagagaacaagctgaagaagaaagatattttagagctcaatctagagaacaattggctgctttgaaaaaa

SEQ ID NO: 1485 - DNA, 243 bp, Artificial Sequence
  Designed; as detailed elsewhere in present application
  CDS (1)..(243)
caccaccaccaccaccacgactacaaggacgacgacgacaagagaagaagaagaagaagaagaggcatggccgtgaccgccctggccgccagaacctggctgggcgtgtggggcgtgagaaccatgcaggccagaggcttcagcatcagagaggccggcggcgccttcggcaagagagagcaggccgaggaggagagatacttcagagcccagagcagagagcagctggccgccctgaagaag

SEQ ID NO: 1486 - DNA, 192 bp, Artificial Sequence
  Designed; as detailed elsewhere in present application
  CDS (1)..(192)
catcatcatcatcatcatgattataaagatgatgatgataaacgtcgtcgtcgtcgtcgtcgtggtatggcagttaccgcactggcagcacgtacctggctgggtgtttggggtgttcgtaccatgcaggcacgtggttttctggcagcactgaaaaaacatcatgaagaagaaattgttcatcataaaaaa

SEQ ID NO: 1487 - DNA, 192 bp, Artificial Sequence
  Designed; as detailed elsewhere in present application
  CDS (1)..(192)
catcatcatcatcatcatgattataaagatgatgatgataaaagaagaagaagaagaagaagaggtatggctgttactgctttggctgctagaacttggttgggtgtttggggtgttagaactatgcaagctagaggttttttggctgctttgaaaaaacatcatgaagaagaaattgttcatcataaaaaa

SEQ ID NO: 1488 - DNA, 192 bp, Artificial Sequence
  Designed; as detailed elsewhere in present application
  CDS (1)..(192)
caccaccaccaccaccacgactacaaggacgacgacgacaagagaagaagaagaagaagaagaggcatggccgtgaccgccctggccgccagaacctggctgggcgtgtggggcgtgagaaccatgcaggccagaggcttcctggccgccctgaagaagcaccacgaggaggagatcgtgcaccacaagaag

SEQ ID NO: 1489 - DNA, 387 bp, Artificial Sequence
  Designed; as detailed elsewhere in present application
  CDS (1)..(387)
catcatcatcatcatcatgattataaagatgatgatgataaacgtcgtcgtcgtcgtcgtcgtggtatggcagttaccgcactggcagcacgtacctggctgggtgtttggggtgttcgtaccatgcaggcacgtggttttggtagcgaaagcgcagataatctgggtagcagcgcaggtgcaattcgtgatgcaggtggtgcatttggtaaaaaagaacaggcagaagaagaacgttattttcgtgcacgtgcaaaagaacagctggcagcactgaaaaaacataaagaaaatgaaattagccatcatgttaaagaaattgaacatctgcagaaagaaattgaacgtcataaacagagcattaaaaaactgaaacatgatgatgat

SEQ ID NO: 1490 - DNA, 387 bp, Artificial Sequence
  Designed; as detailed elsewhere in present application
  CDS (1)..(387)
catcatcatcatcatcatgattataaagatgatgatgataaaagaagaagaagaagaagaagaggtatggctgttactgctttggctgctagaacttggttgggtgtttggggtgttagaactatgcaagctagaggttttggttctgaatctgctgataatttgggttcttctgctggtgctattagagatgctggtggtgcttttggtaaaaaagaacaagctgaagaagaaagatattttagagctagagctaaagaacaattggctgctttgaaaaaacataaagaaaatgaaatttctcatcatgttaaagaaattgaacatttgcaaaaagaaattgaaagacataaacaatctattaaaaaattgaaacatgatgatgat

SEQ ID NO: 1491 - DNA, 387 bp, Artificial Sequence
  Designed; as detailed elsewhere in present application
  CDS (1)..(387)
caccaccaccaccaccacgactacaaggacgacgacgacaagagaagaagaagaagaagaagaggcatggccgtgaccgccctggccgccagaacctggctgggcgtgtggggcgtgagaaccatgcaggccagaggcttcggcagcgagagcgccgacaacctgggcagcagcgccggcgccatcagagacgccggcggcgccttcggcaagaaggagcaggccgaggaggagagatacttcagagccagagccaaggagcagctggccgccctgaagaagcacaaggagaacgagatcagccaccacgtgaaggagatcgagcacctgcagaaggagatcgagagacacaagcagagcatcaagaagctgaagcacgacgacgac

SEQ ID NO: 1492 - DNA, 321 bp, Artificial Sequence
  Designed; as detailed elsewhere in present application
  CDS (1)..(321)
catcatcatcatcatcatgattataaagatgatgatgataaacgtcgtcgtcgtcgtcgtcgtggtatggcagttaccgcactggcagcacgtacctggctgggtgtttggggtgttcgtaccatgcaggcacgtggttttggtagcgaaagcgcagataatctgggtagcagcgcaggtgcaattcgtgatgcaggtggtgcatttggtaaaaaagaacaggcagaagaagaacgttattttcgtgcacgtgcaaaagaacagctggcagcactgaaaaaacataaagaaaatgaaattagccatcatgttaaagaaatt

SEQ ID NO: 1493 - DNA, 321 bp, Artificial Sequence
  Designed; as detailed elsewhere in present application
  CDS (1)..(321)
catcatcatcatcatcatgattataaagatgatgatgataaaagaagaagaagaagaagaagaggtatggctgttactgctttggctgctagaacttggttgggtgtttggggtgttagaactatgcaagctagaggttttggttctgaatctgctgataatttgggttcttctgctggtgctattagagatgctggtggtgcttttggtaaaaaagaacaagctgaagaagaaagatattttagagctagagctaaagaacaattggctgctttgaaaaaacataaagaaaatgaaatttctcatcatgttaaagaaatt

SEQ ID NO: 1494 - DNA, 321 bp, Artificial Sequence
  Designed; as detailed elsewhere in present application
  CDS (1)..(321)
caccaccaccaccaccacgactacaaggacgacgacgacaagagaagaagaagaagaagaagaggcatggccgtgaccgccctggccgccagaacctggctgggcgtgtggggcgtgagaaccatgcaggccagaggcttcggcagcgagagcgccgacaacctgggcagcagcgccggcgccatcagagacgccggcggcgccttcggcaagaaggagcaggccgaggaggagagatacttcagagccagagccaaggagcagctggccgccctgaagaagcacaaggagaacgagatcagccaccacgtgaaggagatc

SEQ ID NO: 1495 - DNA, 294 bp, Artificial Sequence
  Designed; as detailed elsewhere in present application
  CDS (1)..(294)
catcatcatcatcatcatgattataaagatgatgatgataaacgtcgtcgtcgtcgtcgtcgtggtatggcagttaccgcactggcagcacgtacctggctgggtgtttggggtgttcgtaccatgcaggcacgtggttttagcagcgcaggtgcaattcgtgatgcaggtggtgcatttggtaaaaaagaacaggcagaagaagaacgttattttcgtgcacgtgcaaaagaacagctggcagcactgaaaaaacataaagaaaatgaaattagccatcatgttaaagaaatt

SEQ ID NO: 1496 - DNA, 294 bp, Artificial Sequence
  Designed; as detailed elsewhere in present application
  CDS (1)..(294)
catcatcatcatcatcatgattataaagatgatgatgataaaagaagaagaagaagaagaagaggtatggctgttactgctttggctgctagaacttggttgggtgtttggggtgttagaactatgcaagctagaggtttttcttctgctggtgctattagagatgctggtggtgcttttggtaaaaaagaacaagctgaagaagaaagatattttagagctagagctaaagaacaattggctgctttgaaaaaacataaagaaaatgaaatttctcatcatgttaaagaaatt

SEQ ID NO: 1497 - DNA, 294 bp, Artificial Sequence
  Designed; as detailed elsewhere in present application
  CDS (1)..(294)
caccaccaccaccaccacgactacaaggacgacgacgacaagagaagaagaagaagaagaagaggcatggccgtgaccgccctggccgccagaacctggctgggcgtgtggggcgtgagaaccatgcaggccagaggcttcagcagcgccggcgccatcagagacgccggcggcgccttcggcaagaaggagcaggccgaggaggagagatacttcagagccagagccaaggagcagctggccgccctgaagaagcacaaggagaacgagatcagccaccacgtgaaggagatc

SEQ ID NO: 1498 - DNA, 282 bp, Artificial Sequence
  Designed; as detailed elsewhere in present application
  CDS (1)..(282)
catcatcatcatcatcatgattataaagatgatgatgataaacgtcgtcgtcgtcgtcgtcgtggtatggcagttaccgcactggcagcacgtacctggctgggtgtttggggtgttcgtaccatgcaggcacgtggttttgcaattcgtgatgcaggtggtgcatttggtaaaaaagaacaggcagaagaagaacgttattttcgtgcacgtgcaaaagaacagctggcagcactgaaaaaacataaagaaaatgaaattagccatcatgttaaagaaatt

SEQ ID NO: 1499 - DNA, 282 bp, Artificial Sequence
  Designed; as detailed elsewhere in present application
  CDS (1)..(282)
catcatcatcatcatcatgattataaagatgatgatgataaaagaagaagaagaagaagaagaggtatggctgttactgctttggctgctagaacttggttgggtgtttggggtgttagaactatgcaagctagaggttttgctattagagatgctggtggtgcttttggtaaaaaagaacaagctgaagaagaaagatattttagagctagagctaaagaacaattggctgctttgaaaaaacataaagaaaatgaaatttctcatcatgttaaagaaatt

SEQ ID NO: 1500 - DNA, 282 bp, Artificial Sequence
  Designed; as detailed elsewhere in present application
  CDS (1)..(282)
caccaccaccaccaccacgactacaaggacgacgacgacaagagaagaagaagaagaagaagaggcatggccgtgaccgccctggccgccagaacctggctgggcgtgtggggcgtgagaaccatgcaggccagaggcttcgccatcagagacgccggcggcgccttcggcaagaaggagcaggccgaggaggagagatacttcagagccagagccaaggagcagctggccgccctgaagaagcacaaggagaacgagatcagccaccacgtgaaggagatc

SEQ ID NO: 1501 - DNA, 387 bp, Artificial Sequence
  Designed; as detailed elsewhere in present application
  CDS (1)..(387)
catcatcatcatcatcatgattataaagatgatgatgataaacgtcgtcgtcgtcgtcgtcgtggtatggcagttaccgcactggcagcacgtacctggctgggtgtttggggtgttcgtaccatgcaggcacgtggttttggtagcgaaccggcagataatctgggtagcagcgaagcagcagtttggaatgcaggtgttgattttcgtaaacgtgaacaggcaaaaggtgaacgttatctgcgtgcacgtgcaaaagaacagctggcagcactgaaaaaacataaagaaaatgaaattagccatcatgttaaagaaattgaacatctgcagaaagaaattgaacgtcataaacagagcattaaaaaactgaaacatgatgatgat

SEQ ID NO: 1502 - DNA, 387 bp, Artificial Sequence
  Designed; as detailed elsewhere in present application
  CDS (1)..(387)
catcatcatcatcatcatgattataaagatgatgatgataaaagaagaagaagaagaagaagaggtatggctgttactgctttggctgctagaacttggttgggtgtttggggtgttagaactatgcaagctagaggttttggttctgaaccagctgataatttgggttcttctgaagctgctgtttggaatgctggtgttgattttagaaaaagagaacaagctaaaggtgaaagatatttgagagctagagctaaagaacaattggctgctttgaaaaaacataaagaaaatgaaatttctcatcatgttaaagaaattgaacatttgcaaaaagaaattgaaagacataaacaatctattaaaaaattgaaacatgatgatgat

SEQ ID NO: 1503 - DNA, 387 bp, Artificial Sequence
  Designed; as detailed elsewhere in present application
  CDS (1)..(387)
caccaccaccaccaccacgactacaaggacgacgacgacaagagaagaagaagaagaagaagaggcatggccgtgaccgccctggccgccagaacctggctgggcgtgtggggcgtgagaaccatgcaggccagaggcttcggcagcgagcccgccgacaacctgggcagcagcgaggccgccgtgtggaacgccggcgtggacttcagaaagagagagcaggccaagggcgagagatacctgagagccagagccaaggagcagctggccgccctgaagaagcacaaggagaacgagatcagccaccacgtgaaggagatcgagcacctgcagaaggagatcgagagacacaagcagagcatcaagaagctgaagcacgacgacgac

SEQ ID NO: 1504 - DNA, 321 bp, Artificial Sequence
  Designed; as detailed elsewhere in present application
  CDS (1)..(321)
catcatcatcatcatcatgattataaagatgatgatgataaacgtcgtcgtcgtcgtcgtcgtggtatggcagttaccgcactggcagcacgtacctggctgggtgtttggggtgttcgtaccatgcaggcacgtggttttggtagcgaaccggcagataatctgggtagcagcgaagcagcagtttggaatgcaggtgttgattttcgtaaacgtgaacaggcaaaaggtgaacgttatctgcgtgcacgtgcaaaagaacagctggcagcactgaaaaaacataaagaaaatgaaattagccatcatgttaaagaaatt

SEQ ID NO: 1505 - DNA, 321 bp, Artificial Sequence
  Designed; as detailed elsewhere in present application
  CDS (1)..(321)
catcatcatcatcatcatgattataaagatgatgatgataaaagaagaagaagaagaagaagaggtatggctgttactgctttggctgctagaacttggttgggtgtttggggtgttagaactatgcaagctagaggttttggttctgaaccagctgataatttgggttcttctgaagctgctgtttggaatgctggtgttgattttagaaaaagagaacaagctaaaggtgaaagatatttgagagctagagctaaagaacaattggctgctttgaaaaaacataaagaaaatgaaatttctcatcatgttaaagaaatt

SEQ ID NO: 1506 - DNA, 321 bp, Artificial Sequence
  Designed; as detailed elsewhere in present application
  CDS (1)..(321)
caccaccaccaccaccacgactacaaggacgacgacgacaagagaagaagaagaagaagaagaggcatggccgtgaccgccctggccgccagaacctggctgggcgtgtggggcgtgagaaccatgcaggccagaggcttcggcagcgagcccgccgacaacctgggcagcagcgaggccgccgtgtggaacgccggcgtggacttcagaaagagagagcaggccaagggcgagagatacctgagagccagagccaaggagcagctggccgccctgaagaagcacaaggagaacgagatcagccaccacgtgaaggagatc

SEQ ID NO: 1507 - DNA, 294 bp, Artificial Sequence
  Designed; as detailed elsewhere in present application
  CDS (1)..(294)
catcatcatcatcatcatgattataaagatgatgatgataaacgtcgtcgtcgtcgtcgtcgtggtatggcagttaccgcactggcagcacgtacctggctgggtgtttggggtgttcgtaccatgcaggcacgtggttttagcagcgaagcagcagtttggaatgcaggtgttgattttcgtaaacgtgaacaggcaaaaggtgaacgttatctgcgtgcacgtgcaaaagaacagctggcagcactgaaaaaacataaagaaaatgaaattagccatcatgttaaagaaatt

SEQ ID NO: 1508 - DNA, 294 bp, Artificial Sequence
  Designed; as detailed elsewhere in present application
  CDS (1)..(294)
catcatcatcatcatcatgattataaagatgatgatgataaaagaagaagaagaagaagaagaggtatggctgttactgctttggctgctagaacttggttgggtgtttggggtgttagaactatgcaagctagaggtttttcttctgaagctgctgtttggaatgctggtgttgattttagaaaaagagaacaagctaaaggtgaaagatatttgagagctagagctaaagaacaattggctgctttgaaaaaacataaagaaaatgaaatttctcatcatgttaaagaaatt

SEQ ID NO: 1509 - DNA, 294 bp, Artificial Sequence
  Designed; as detailed elsewhere in present application
  CDS (1)..(294)
caccaccaccaccaccacgactacaaggacgacgacgacaagagaagaagaagaagaagaagaggcatggccgtgaccgccctggccgccagaacctggctgggcgtgtggggcgtgagaaccatgcaggccagaggcttcagcagcgaggccgccgtgtggaacgccggcgtggacttcagaaagagagagcaggccaagggcgagagatacctgagagccagagccaaggagcagctggccgccctgaagaagcacaaggagaacgagatcagccaccacgtgaaggagatc

SEQ ID NO: 1510 - DNA, 282 bp, Artificial Sequence
  Designed; as detailed elsewhere in present application
  CDS (1)..(282)
catcatcatcatcatcatgattataaagatgatgatgataaacgtcgtcgtcgtcgtcgtcgtggtatggcagttaccgcactggcagcacgtacctggctgggtgtttggggtgttcgtaccatgcaggcacgtggttttgcagtttggaatgcaggtgttgattttcgtaaacgtgaacaggcaaaaggtgaacgttatctgcgtgcacgtgcaaaagaacagctggcagcactgaaaaaacataaagaaaatgaaattagccatcatgttaaagaaatt

SEQ ID NO: 1511 - DNA, 282 bp, Artificial Sequence
  Designed; as detailed elsewhere in present application
  CDS (1)..(282)
catcatcatcatcatcatgattataaagatgatgatgataaaagaagaagaagaagaagaagaggtatggctgttactgctttggctgctagaacttggttgggtgtttggggtgttagaactatgcaagctagaggttttgctgtttggaatgctggtgttgattttagaaaaagagaacaagctaaaggtgaaagatatttgagagctagagctaaagaacaattggctgctttgaaaaaacataaagaaaatgaaatttctcatcatgttaaagaaatt

SEQ ID NO: 1512 - DNA, 282 bp, Artificial Sequence
  Designed; as detailed elsewhere in present application
  CDS (1)..(282)
caccaccaccaccaccacgactacaaggacgacgacgacaagagaagaagaagaagaagaagaggcatggccgtgaccgccctggccgccagaacctggctgggcgtgtggggcgtgagaaccatgcaggccagaggcttcgccgtgtggaacgccggcgtggacttcagaaagagagagcaggccaagggcgagagatacctgagagccagagccaaggagcagctggccgccctgaagaagcacaaggagaacgagatcagccaccacgtgaaggagatc

SEQ ID NO: 1513 - DNA, 246 bp, Artificial Sequence
  Designed; as detailed elsewhere in present application
  CDS (1)..(246)
catcatcatcatcatcatgattataaagatgatgatgataaacgtcgtcgtcgtcgtcgtcgtggtatggcagttaccgcactggcagcacgtacctggctgggtgtttggggtgttcgtaccatgcaggcacgtggttttgcagcagtttggaatgcaggtgttgattttcgtaaacgtgaacaggcaaaaggtgaacgttatctgcgtgcacgtgcaaaagaacagctggcagcactgaaaaaa

SEQ ID NO: 1514 - DNA, 246 bp, Artificial Sequence
  Designed; as detailed elsewhere in present application
  CDS (1)..(246)
catcatcatcatcatcatgattataaagatgatgatgataaaagaagaagaagaagaagaagaggtatggctgttactgctttggctgctagaacttggttgggtgtttggggtgttagaactatgcaagctagaggttttgctgctgtttggaatgctggtgttgattttagaaaaagagaacaagctaaaggtgaaagatatttgagagctagagctaaagaacaattggctgctttgaaaaaa

SEQ ID NO: 1515 - DNA, 246 bp, Artificial Sequence
  Designed; as detailed elsewhere in present application
  CDS (1)..(246)
caccaccaccaccaccacgactacaaggacgacgacgacaagagaagaagaagaagaagaagaggcatggccgtgaccgccctggccgccagaacctggctgggcgtgtggggcgtgagaaccatgcaggccagaggcttcgccgccgtgtggaacgccggcgtggacttcagaaagagagagcaggccaagggcgagagatacctgagagccagagccaaggagcagctggccgccctgaagaag

SEQ ID NO: 1516 - DNA, 243 bp, Artificial Sequence
  Designed; as detailed elsewhere in present application
  CDS (1)..(243)
catcatcatcatcatcatgattataaagatgatgatgataaacgtcgtcgtcgtcgtcgtcgtggtatggcagttaccgcactggcagcacgtacctggctgggtgtttggggtgttcgtaccatgcaggcacgtggttttgcagtttggaatgcaggtgttgattttcgtaaacgtgaacaggcaaaaggtgaacgttatctgcgtgcacgtgcaaaagaacagctggcagcactgaaaaaa

SEQ ID NO: 1517 - DNA, 243 bp, Artificial Sequence
  Designed; as detailed elsewhere in present application
  CDS (1)..(243)
catcatcatcatcatcatgattataaagatgatgatgataaaagaagaagaagaagaagaagaggtatggctgttactgctttggctgctagaacttggttgggtgtttggggtgttagaactatgcaagctagaggttttgctgtttggaatgctggtgttgattttagaaaaagagaacaagctaaaggtgaaagatatttgagagctagagctaaagaacaattggctgctttgaaaaaa

SEQ ID NO: 1518 - DNA, 243 bp, Artificial Sequence
  Designed; as detailed elsewhere in present application
  CDS (1)..(243)
caccaccaccaccaccacgactacaaggacgacgacgacaagagaagaagaagaagaagaagaggcatggccgtgaccgccctggccgccagaacctggctgggcgtgtggggcgtgagaaccatgcaggccagaggcttcgccgtgtggaacgccggcgtggacttcagaaagagagagcaggccaagggcgagagatacctgagagccagagccaaggagcagctggccgccctgaagaag

SEQ ID NO: 1519 - DNA, 384 bp, Artificial Sequence
  Designed; as detailed elsewhere in present application
  CDS (1)..(384)
catcatcatcatcatcatgattataaagatgatgatgataaacgtcgtcgtcgtcgtcgtcgtggtatggcagttaccgcactggcagcacgtacctggctgggtgtttggggtgttcgtaccatgcaggcacgtggttttggtagcgatcagagcgaaaatgttgatcgtggtgcaggtgcaattcgtgaagcaggtggtgcatttggtaaacgtgaacaggcagaagaagaacgttattttcgtgcacagagccgtgaacagctggcagcactgaaaaaacataaagaagaagaaattgttcatcataaaaaagaaattgaacgtctgcagaaagaaattgaacgtcataaacagaaaattaaaatgctgaaacatgatgat

SEQ ID NO: 1520 - DNA, 384 bp, Artificial Sequence
  Designed; as detailed elsewhere in present application
  CDS (1)..(384)
catcatcatcatcatcatgattataaagatgatgatgataaaagaagaagaagaagaagaagaggtatggctgttactgctttggctgctagaacttggttgggtgtttggggtgttagaactatgcaagctagaggttttggttctgatcaatctgaaaatgttgatagaggtgctggtgctattagagaagctggtggtgcttttggtaaaagagaacaagctgaagaagaaagatattttagagctcaatctagagaacaattggctgctttgaaaaaacataaagaagaagaaattgttcatcataaaaaagaaattgaaagattgcaaaaagaaattgaaagacataaacaaaaaattaaaatgttgaaacatgatgat

SEQ ID NO: 1521 - DNA, 384 bp, Artificial Sequence
  Designed; as detailed elsewhere in present application
  CDS (1)..(384)
caccaccaccaccaccacgactacaaggacgacgacgacaagagaagaagaagaagaagaagaggcatggccgtgaccgccctggccgccagaacctggctgggcgtgtggggcgtgagaaccatgcaggccagaggcttcggcagcgaccagagcgagaacgtggacagaggcgccggcgccatcagagaggccggcggcgccttcggcaagagagagcaggccgaggaggagagatacttcagagcccagagcagagagcagctggccgccctgaagaagcacaaggaggaggagatcgtgcaccacaagaaggagatcgagagactgcagaaggagatcgagagacacaagcagaagatcaagatgctgaagcacgacgac

SEQ ID NO: 1522 - DNA, 321 bp, Artificial Sequence
  Designed; as detailed elsewhere in present application
  CDS (1)..(321)
catcatcatcatcatcatgattataaagatgatgatgataaacgtcgtcgtcgtcgtcgtcgtggtatggcagttaccgcactggcagcacgtacctggctgggtgtttggggtgttcgtaccatgcaggcacgtggttttggtagcgatcagagcgaaaatgttgatcgtggtgcaggtgcaattcgtgaagcaggtggtgcatttggtaaacgtgaacaggcagaagaagaacgttattttcgtgcacagagccgtgaacagctggcagcactgaaaaaacataaagaagaagaaattgttcatcataaaaaagaaatt

SEQ ID NO: 1523 - DNA, 321 bp, Artificial Sequence
  Designed; as detailed elsewhere in present application
  CDS (1)..(321)
catcatcatcatcatcatgattataaagatgatgatgataaaagaagaagaagaagaagaagaggtatggctgttactgctttggctgctagaacttggttgggtgtttggggtgttagaactatgcaagctagaggttttggttctgatcaatctgaaaatgttgatagaggtgctggtgctattagagaagctggtggtgcttttggtaaaagagaacaagctgaagaagaaagatattttagagctcaatctagagaacaattggctgctttgaaaaaacataaagaagaagaaattgttcatcataaaaaagaaatt

SEQ ID NO: 1524 - DNA, 321 bp, Artificial Sequence
  Designed; as detailed elsewhere in present application
  CDS (1)..(321)
caccaccaccaccaccacgactacaaggacgacgacgacaagagaagaagaagaagaagaagaggcatggccgtgaccgccctggccgccagaacctggctgggcgtgtggggcgtgagaaccatgcaggccagaggcttcggcagcgaccagagcgagaacgtggacagaggcgccggcgccatcagagaggccggcggcgccttcggcaagagagagcaggccgaggaggagagatacttcagagcccagagcagagagcagctggccgccctgaagaagcacaaggaggaggagatcgtgcaccacaagaaggagatc

SEQ ID NO: 1525 - DNA, 294 bp, Artificial Sequence
  Designed; as detailed elsewhere in present application
  CDS (1)..(294)
catcatcatcatcatcatgattataaagatgatgatgataaacgtcgtcgtcgtcgtcgtcgtggtatggcagttaccgcactggcagcacgtacctggctgggtgtttggggtgttcgtaccatgcaggcacgtggttttcgtggtgcaggtgcaattcgtgaagcaggtggtgcatttggtaaacgtgaacaggcagaagaagaacgttattttcgtgcacagagccgtgaacagctggcagcactgaaaaaacataaagaagaagaaattgttcatcataaaaaagaaatt

SEQ ID NO: 1526 - DNA, 294 bp, Artificial Sequence
  Designed; as detailed elsewhere in present application
  CDS (1)..(294)
catcatcatcatcatcatgattataaagatgatgatgataaaagaagaagaagaagaagaagaggtatggctgttactgctttggctgctagaacttggttgggtgtttggggtgttagaactatgcaagctagaggttttagaggtgctggtgctattagagaagctggtggtgcttttggtaaaagagaacaagctgaagaagaaagatattttagagctcaatctagagaacaattggctgctttgaaaaaacataaagaagaagaaattgttcatcataaaaaagaaatt

SEQ ID NO: 1527 - DNA, 294 bp, Artificial Sequence
  Designed; as detailed elsewhere in present application
  CDS (1)..(294)
caccaccaccaccaccacgactacaaggacgacgacgacaagagaagaagaagaagaagaagaggcatggccgtgaccgccctggccgccagaacctggctgggcgtgtggggcgtgagaaccatgcaggccagaggcttcagaggcgccggcgccatcagagaggccggcggcgccttcggcaagagagagcaggccgaggaggagagatacttcagagcccagagcagagagcagctggccgccctgaagaagcacaaggaggaggagatcgtgcaccacaagaaggagatc

SEQ ID NO: 1528 - DNA, 282 bp, Artificial Sequence
  Designed; as detailed elsewhere in present application
  CDS (1)..(282)
catcatcatcatcatcatgattataaagatgatgatgataaacgtcgtcgtcgtcgtcgtcgtggtatggcagttaccgcactggcagcacgtacctggctgggtgtttggggtgttcgtaccatgcaggcacgtggttttgcaattcgtgaagcaggtggtgcatttggtaaacgtgaacaggcagaagaagaacgttattttcgtgcacagagccgtgaacagctggcagcactgaaaaaacataaagaagaagaaattgttcatcataaaaaagaaatt

SEQ ID NO: 1529 - DNA, 282 bp, Artificial Sequence
  Designed; as detailed elsewhere in present application
  CDS (1)..(282)
catcatcatcatcatcatgattataaagatgatgatgataaaagaagaagaagaagaagaagaggtatggctgttactgctttggctgctagaacttggttgggtgtttggggtgttagaactatgcaagctagaggttttgctattagagaagctggtggtgcttttggtaaaagagaacaagctgaagaagaaagatattttagagctcaatctagagaacaattggctgctttgaaaaaacataaagaagaagaaattgttcatcataaaaaagaaatt

SEQ ID NO: 1530 - DNA, 282 bp, Artificial Sequence
  Designed; as detailed elsewhere in present application
  CDS (1)..(282)
caccaccaccaccaccacgactacaaggacgacgacgacaagagaagaagaagaagaagaagaggcatggccgtgaccgccctggccgccagaacctggctgggcgtgtggggcgtgagaaccatgcaggccagaggcttcgccatcagagaggccggcggcgccttcggcaagagagagcaggccgaggaggagagatacttcagagcccagagcagagagcagctggccgccctgaagaagcacaaggaggaggagatcgtgcaccacaagaaggagatc

SEQ ID NO: 1531 - DNA, 246 bp, Artificial Sequence
  Designed; as detailed elsewhere in present application
  CDS (1)..(246)
catcatcatcatcatcatgattataaagatgatgatgataaacgtcgtcgtcgtcgtcgtcgtggtatggcagttaccgcactggcagcacgtacctggctgggtgtttggggtgttcgtaccatgcaggcacgtggttttggtgcaattcgtgaagcaggtggtgcatttggtaaacgtgaacaggcagaagaagaacgttattttcgtgcacagagccgtgaacagctggcagcactgaaaaaa

SEQ ID NO: 1532 - DNA, 246 bp, Artificial Sequence
  Designed; as detailed elsewhere in present application
  CDS (1)..(246)
catcatcatcatcatcatgattataaagatgatgatgataaaagaagaagaagaagaagaagaggtatggctgttactgctttggctgctagaacttggttgggtgtttggggtgttagaactatgcaagctagaggttttggtgctattagagaagctggtggtgcttttggtaaaagagaacaagctgaagaagaaagatattttagagctcaatctagagaacaattggctgctttgaaaaaa

SEQ ID NO: 1533 - DNA, 246 bp, Artificial Sequence
  Designed; as detailed elsewhere in present application
  CDS (1)..(246)
caccaccaccaccaccacgactacaaggacgacgacgacaagagaagaagaagaagaagaagaggcatggccgtgaccgccctggccgccagaacctggctgggcgtgtggggcgtgagaaccatgcaggccagaggcttcggcgccatcagagaggccggcggcgccttcggcaagagagagcaggccgaggaggagagatacttcagagcccagagcagagagcagctggccgccctgaagaag

SEQ ID NO: 1534 - DNA, 243 bp, Artificial Sequence
  Designed; as detailed elsewhere in present application
  CDS (1)..(243)
catcatcatcatcatcatgattataaagatgatgatgataaacgtcgtcgtcgtcgtcgtcgtggtatggcagttaccgcactggcagcacgtacctggctgggtgtttggggtgttcgtaccatgcaggcacgtggttttgcaattcgtgaagcaggtggtgcatttggtaaacgtgaacaggcagaagaagaacgttattttcgtgcacagagccgtgaacagctggcagcactgaaaaaa

SEQ ID NO: 1535 - DNA, 243 bp, Artificial Sequence
  Designed; as detailed elsewhere in present application
  CDS (1)..(243)
catcatcatcatcatcatgattataaagatgatgatgataaaagaagaagaagaagaagaagaggtatggctgttactgctttggctgctagaacttggttgggtgtttggggtgttagaactatgcaagctagaggttttgctattagagaagctggtggtgcttttggtaaaagagaacaagctgaagaagaaagatattttagagctcaatctagagaacaattggctgctttgaaaaaa

SEQ ID NO: 1536 - DNA, 243 bp, Artificial Sequence
  Designed; as detailed elsewhere in present application
  CDS (1)..(243)
caccaccaccaccaccacgactacaaggacgacgacgacaagagaagaagaagaagaagaagaggcatggccgtgaccgccctggccgccagaacctggctgggcgtgtggggcgtgagaaccatgcaggccagaggcttcgccatcagagaggccggcggcgccttcggcaagagagagcaggccgaggaggagagatacttcagagcccagagcagagagcagctggccgccctgaagaag

SEQ ID NO: 1537 - DNA, 402 bp, Artificial Sequence
  Designed; as detailed elsewhere in present application
  CDS (1)..(402)
catcatcatcatcatcatgattataaagatgatgatgataaaggttatggtcgtaaaaaacgtcgtcagcgtcgtcgtggtatggcaggtagcgcactggcagttcgtgcacgttttggtgtttggggtatgaaagttctgcagacccgtggttttggtagcgaaagcgcagataatctgggtagcagcgcaggtgcaattcgtgatgcaggtggtgcatttggtaaaaaagaacaggcagaagaagaacgttattttcgtgcacgtgcaaaagaacagctggcagcactgaaaaaacatcatgaaaatgaaattagccatcatgttaaagaaattgaacatctgcagaaagaaattgaacgtcataaacagagcattaaaaaactgaaacatgatgatgat

SEQ ID NO: 1538 - DNA, 402 bp, Artificial Sequence
  Designed; as detailed elsewhere in present application
  CDS (1)..(402)
catcatcatcatcatcatgattataaagatgatgatgataaaggttatggtagaaaaaaaagaagacaaagaagaagaggtatggctggttctgctttggctgttagagctagatttggtgtttggggtatgaaagttttgcaaactagaggttttggttctgaatctgctgataatttgggttcttctgctggtgctattagagatgctggtggtgcttttggtaaaaaagaacaagctgaagaagaaagatattttagagctagagctaaagaacaattggctgctttgaaaaaacatcatgaaaatgaaatttctcatcatgttaaagaaattgaacatttgcaaaaagaaattgaaagacataaacaatctattaaaaaattgaaacatgatgatgat

SEQ ID NO: 1539 - DNA, 402 bp, Artificial Sequence
  Designed; as detailed elsewhere in present application
  CDS (1)..(402)
caccaccaccaccaccacgactacaaggacgacgacgacaagggctacggcaggaagaagaggaggcagaggaggaggggcatggccggcagcgccctggccgtgagggccaggttcggcgtgtggggcatgaaggtgctgcagaccaggggcttcggcagcgagagcgccgacaacctgggcagcagcgccggcgccatcagggacgccggcggcgccttcggcaagaaggagcaggccgaggaggagaggtacttcagggccagggccaaggagcagctggccgccctgaagaagcaccacgagaacgagatcagccaccacgtgaaggagatcgagcacctgcagaaggagatcgagaggcacaagcagagcatcaagaagctgaagcacgacgacgac

SEQ ID NO: 1540 - DNA, 336 bp, Artificial Sequence
  Designed; as detailed elsewhere in present application
  CDS (1)..(336)
catcatcatcatcatcatgattataaagatgatgatgataaaggttatggtcgtaaaaaacgtcgtcagcgtcgtcgtggtatggcaggtagcgcactggcagttcgtgcacgttttggtgtttggggtatgaaagttctgcagacccgtggttttggtagcgaaagcgcagataatctgggtagcagcgcaggtgcaattcgtgatgcaggtggtgcatttggtaaaaaagaacaggcagaagaagaacgttattttcgtgcacgtgcaaaagaacagctggcagcactgaaaaaacatcatgaaaatgaaattagccatcatgttaaagaaatt

SEQ ID NO: 1541 - DNA, 336 bp, Artificial Sequence
  Designed; as detailed elsewhere in present application
  CDS (1)..(336)
catcatcatcatcatcatgattataaagatgatgatgataaaggttatggtagaaaaaaaagaagacaaagaagaagaggtatggctggttctgctttggctgttagagctagatttggtgtttggggtatgaaagttttgcaaactagaggttttggttctgaatctgctgataatttgggttcttctgctggtgctattagagatgctggtggtgcttttggtaaaaaagaacaagctgaagaagaaagatattttagagctagagctaaagaacaattggctgctttgaaaaaacatcatgaaaatgaaatttctcatcatgttaaagaaatt

SEQ ID NO: 1542 - DNA, 336 bp, Artificial Sequence
  Designed; as detailed elsewhere in present application
  CDS (1)..(336)
caccaccaccaccaccacgactacaaggacgacgacgacaagggctacggcaggaagaagaggaggcagaggaggaggggcatggccggcagcgccctggccgtgagggccaggttcggcgtgtggggcatgaaggtgctgcagaccaggggcttcggcagcgagagcgccgacaacctgggcagcagcgccggcgccatcagggacgccggcggcgccttcggcaagaaggagcaggccgaggaggagaggtacttcagggccagggccaaggagcagctggccgccctgaagaagcaccacgagaacgagatcagccaccacgtgaaggagatc

SEQ ID NO: 1543 - DNA, 309 bp, Artificial Sequence
  Designed; as detailed elsewhere in present application
  CDS (1)..(309)
catcatcatcatcatcatgattataaagatgatgatgataaaggttatggtcgtaaaaaacgtcgtcagcgtcgtcgtggtatggcaggtagcgcactggcagttcgtgcacgttttggtgtttggggtatgaaagttctgcagacccgtggttttagcagcgcaggtgcaattcgtgatgcaggtggtgcatttggtaaaaaagaacaggcagaagaagaacgttattttcgtgcacgtgcaaaagaacagctggcagcactgaaaaaacatcatgaaaatgaaattagccatcatgttaaagaaatt

SEQ ID NO: 1544 - DNA, 309 bp, Artificial Sequence
  Designed; as detailed elsewhere in present application
  CDS (1)..(309)
catcatcatcatcatcatgattataaagatgatgatgataaaggttatggtagaaaaaaaagaagacaaagaagaagaggtatggctggttctgctttggctgttagagctagatttggtgtttggggtatgaaagttttgcaaactagaggtttttcttctgctggtgctattagagatgctggtggtgcttttggtaaaaaagaacaagctgaagaagaaagatattttagagctagagctaaagaacaattggctgctttgaaaaaacatcatgaaaatgaaatttctcatcatgttaaagaaatt

SEQ ID NO: 1545 - DNA, 309 bp, Artificial Sequence
  Designed; as detailed elsewhere in present application
  CDS (1)..(309)
caccaccaccaccaccacgactacaaggacgacgacgacaagggctacggcaggaagaagaggaggcagaggaggaggggcatggccggcagcgccctggccgtgagggccaggttcggcgtgtggggcatgaaggtgctgcagaccaggggcttcagcagcgccggcgccatcagggacgccggcggcgccttcggcaagaaggagcaggccgaggaggagaggtacttcagggccagggccaaggagcagctggccgccctgaagaagcaccacgagaacgagatcagccaccacgtgaaggagatc

SEQ ID NO: 1546 - DNA, 297 bp, Artificial Sequence
  Designed; as detailed elsewhere in present application
  CDS (1)..(297)
catcatcatcatcatcatgattataaagatgatgatgataaaggttatggtcgtaaaaaacgtcgtcagcgtcgtcgtggtatggcaggtagcgcactggcagttcgtgcacgttttggtgtttggggtatgaaagttctgcagacccgtggttttgcaattcgtgatgcaggtggtgcatttggtaaaaaagaacaggcagaagaagaacgttattttcgtgcacgtgcaaaagaacagctggcagcactgaaaaaacatcatgaaaatgaaattagccatcatgttaaagaaatt

SEQ ID NO: 1547 - DNA, 297 bp, Artificial Sequence
  Designed; as detailed elsewhere in present application
  CDS (1)..(297)
catcatcatcatcatcatgattataaagatgatgatgataaaggttatggtagaaaaaaaagaagacaaagaagaagaggtatggctggttctgctttggctgttagagctagatttggtgtttggggtatgaaagttttgcaaactagaggttttgctattagagatgctggtggtgcttttggtaaaaaagaacaagctgaagaagaaagatattttagagctagagctaaagaacaattggctgctttgaaaaaacatcatgaaaatgaaatttctcatcatgttaaagaaatt

SEQ ID NO: 1548 - DNA, 297 bp, Artificial Sequence
  Designed; as detailed elsewhere in present application
  CDS (1)..(297)
caccaccaccaccaccacgactacaaggacgacgacgacaagggctacggcaggaagaagaggaggcagaggaggaggggcatggccggcagcgccctggccgtgagggccaggttcggcgtgtggggcatgaaggtgctgcagaccaggggcttcgccatcagggacgccggcggcgccttcggcaagaaggagcaggccgaggaggagaggtacttcagggccagggccaaggagcagctggccgccctgaagaagcaccacgagaacgagatcagccaccacgtgaaggagatc

SEQ ID NO: 1549 - DNA, 261 bp, Artificial Sequence
  Designed; as detailed elsewhere in present application
  CDS (1)..(261)
catcatcatcatcatcatgattataaagatgatgatgataaaggttatggtcgtaaaaaacgtcgtcagcgtcgtcgtggtatggcaggtagcgcactggcagttcgtgcacgttttggtgtttggggtatgaaagttctgcagacccgtggttttggtgcaattcgtgatgcaggtggtgcatttggtaaaaaagaacaggcagaagaagaacgttattttcgtgcacgtgcaaaagaacagctggcagcactgaaaaaa

SEQ ID NO: 1550 - DNA, 261 bp, Artificial Sequence
  Designed; as detailed elsewhere in present application
  CDS (1)..(261)
catcatcatcatcatcatgattataaagatgatgatgataaaggttatggtagaaaaaaaagaagacaaagaagaagaggtatggctggttctgctttggctgttagagctagatttggtgtttggggtatgaaagttttgcaaactagaggttttggtgctattagagatgctggtggtgcttttggtaaaaaagaacaagctgaagaagaaagatattttagagctagagctaaagaacaattggctgctttgaaaaaa

SEQ ID NO: 1551 - DNA, 261 bp, Artificial Sequence
  Designed; as detailed elsewhere in present application
  CDS (1)..(261)
caccaccaccaccaccacgactacaaggacgacgacgacaagggctacggcaggaagaagaggaggcagaggaggaggggcatggccggcagcgccctggccgtgagggccaggttcggcgtgtggggcatgaaggtgctgcagaccaggggcttcggcgccatcagggacgccggcggcgccttcggcaagaaggagcaggccgaggaggagaggtacttcagggccagggccaaggagcagctggccgccctgaagaag

SEQ ID NO: 1552 - DNA, 258 bp, Artificial Sequence
  Designed; as detailed elsewhere in present application
  CDS (1)..(258)
catcatcatcatcatcatgattataaagatgatgatgataaaggttatggtcgtaaaaaacgtcgtcagcgtcgtcgtggtatggcaggtagcgcactggcagttcgtgcacgttttggtgtttggggtatgaaagttctgcagacccgtggttttgcaattcgtgatgcaggtggtgcatttggtaaaaaagaacaggcagaagaagaacgttattttcgtgcacgtgcaaaagaacagctggcagcactgaaaaaa

SEQ ID NO: 1553 - DNA, 258 bp, Artificial Sequence
  Designed; as detailed elsewhere in present application
  CDS (1)..(258)
catcatcatcatcatcatgattataaagatgatgatgataaaggttatggtagaaaaaaaagaagacaaagaagaagaggtatggctggttctgctttggctgttagagctagatttggtgtttggggtatgaaagttttgcaaactagaggttttgctattagagatgctggtggtgcttttggtaaaaaagaacaagctgaagaagaaagatattttagagctagagctaaagaacaattggctgctttgaaaaaa

SEQ ID NO: 1554 - DNA, 258 bp, Artificial Sequence
  Designed; as detailed elsewhere in present application
  CDS (1)..(258)
caccaccaccaccaccacgactacaaggacgacgacgacaagggctacggcaggaagaagaggaggcagaggaggaggggcatggccggcagcgccctggccgtgagggccaggttcggcgtgtggggcatgaaggtgctgcagaccaggggcttcgccatcagggacgccggcggcgccttcggcaagaaggagcaggccgaggaggagaggtacttcagggccagggccaaggagcagctggccgccctgaagaag

SEQ ID NO: 1555 - DNA, 207 bp, Artificial Sequence
  Designed; as detailed elsewhere in present application
  CDS (1)..(207)
catcatcatcatcatcatgattataaagatgatgatgataaaggttatggtcgtaaaaaacgtcgtcagcgtcgtcgtggtatggcaggtagcgcactggcagttcgtgcacgttttggtgtttggggtatgaaagttctgcagacccgtggttttctggcagcactgaaaaaacatcatgaaaatgaaattagccatcatgttaaa

SEQ ID NO: 1556 - DNA, 207 bp, Artificial Sequence
  Designed; as detailed elsewhere in present application
  CDS (1)..(207)
catcatcatcatcatcatgattataaagatgatgatgataaaggttatggtagaaaaaaaagaagacaaagaagaagaggtatggctggttctgctttggctgttagagctagatttggtgtttggggtatgaaagttttgcaaactagaggttttttggctgctttgaaaaaacatcatgaaaatgaaatttctcatcatgttaaa

SEQ ID NO: 1557 - DNA, 207 bp, Artificial Sequence
  Designed; as detailed elsewhere in present application
  CDS (1)..(207)
caccaccaccaccaccacgactacaaggacgacgacgacaagggctacggcaggaagaagaggaggcagaggaggaggggcatggccggcagcgccctggccgtgagggccaggttcggcgtgtggggcatgaaggtgctgcagaccaggggcttcctggccgccctgaagaagcaccacgagaacgagatcagccaccacgtgaag

SEQ ID NO: 1558 - DNA, 402 bp, Artificial Sequence
  Designed; as detailed elsewhere in present application
  CDS (1)..(402)
catcatcatcatcatcatgattataaagatgatgatgataaaggttatggtcgtaaaaaacgtcgtcagcgtcgtcgtggtatggcaggtagcgcactggcagttcgtgcacgttttggtgtttggggtatgaaagttctgcagacccgtggttttggtagcgaaccggcagataatctgggtagcagcgaagcaaccgtttggaatgcaggtgttgattttcgtaaacgtgaacaggcaaaaggtgaacgttatctgcgtgcacgtgcaaaagaacagctggcagcactgaaaaaacatcatgaaaatgaaattagccatcatgttaaagaaattgaacatctgcagaaagaaattgaacgtcataaacagagcattaaaaaactgaaacatgatgatgat

SEQ ID NO: 1559 - DNA, 402 bp, Artificial Sequence
  Designed; as detailed elsewhere in present application
  CDS (1)..(402)
catcatcatcatcatcatgattataaagatgatgatgataaaggttatggtagaaaaaaaagaagacaaagaagaagaggtatggctggttctgctttggctgttagagctagatttggtgtttggggtatgaaagttttgcaaactagaggttttggttctgaaccagctgataatttgggttcttctgaagctactgtttggaatgctggtgttgattttagaaaaagagaacaagctaaaggtgaaagatatttgagagctagagctaaagaacaattggctgctttgaaaaaacatcatgaaaatgaaatttctcatcatgttaaagaaattgaacatttgcaaaaagaaattgaaagacataaacaatctattaaaaaattgaaacatgatgatgat

SEQ ID NO: 1560 - DNA, 402 bp, Artificial Sequence
  Designed; as detailed elsewhere in present application
  CDS (1)..(402)
caccaccaccaccaccacgactacaaggacgacgacgacaagggctacggcaggaagaagaggaggcagaggaggaggggcatggccggcagcgccctggccgtgagggccaggttcggcgtgtggggcatgaaggtgctgcagaccaggggcttcggcagcgagcctgccgacaacctgggcagcagcgaggccaccgtgtggaacgccggcgtggacttcaggaagagggagcaggccaagggcgagaggtacctgagggccagggccaaggagcagctggccgccctgaagaagcaccacgagaacgagatcagccaccacgtgaaggagatcgagcacctgcagaaggagatcgagaggcacaagcagagcatcaagaagctgaagcacgacgacgac

SEQ ID NO: 1561 - DNA, 336 bp, Artificial Sequence
  Designed; as detailed elsewhere in present application
  CDS (1)..(336)
catcatcatcatcatcatgattataaagatgatgatgataaaggttatggtcgtaaaaaacgtcgtcagcgtcgtcgtggtatggcaggtagcgcactggcagttcgtgcacgttttggtgtttggggtatgaaagttctgcagacccgtggttttggtagcgaaccggcagataatctgggtagcagcgaagcaaccgtttggaatgcaggtgttgattttcgtaaacgtgaacaggcaaaaggtgaacgttatctgcgtgcacgtgcaaaagaacagctggcagcactgaaaaaacatcatgaaaatgaaattagccatcatgttaaagaaatt

SEQ ID NO: 1562 - DNA, 336 bp, Artificial Sequence
  Designed; as detailed elsewhere in present application
  CDS (1)..(336)
catcatcatcatcatcatgattataaagatgatgatgataaaggttatggtagaaaaaaaagaagacaaagaagaagaggtatggctggttctgctttggctgttagagctagatttggtgtttggggtatgaaagttttgcaaactagaggttttggttctgaaccagctgataatttgggttcttctgaagctactgtttggaatgctggtgttgattttagaaaaagagaacaagctaaaggtgaaagatatttgagagctagagctaaagaacaattggctgctttgaaaaaacatcatgaaaatgaaatttctcatcatgttaaagaaatt

SEQ ID NO: 1563 - DNA, 336 bp, Artificial Sequence
  Designed; as detailed elsewhere in present application
  CDS (1)..(336)
caccaccaccaccaccacgactacaaggacgacgacgacaagggctacggcaggaagaagaggaggcagaggaggaggggcatggccggcagcgccctggccgtgagggccaggttcggcgtgtggggcatgaaggtgctgcagaccaggggcttcggcagcgagcctgccgacaacctgggcagcagcgaggccaccgtgtggaacgccggcgtggacttcaggaagagggagcaggccaagggcgagaggtacctgagggccagggccaaggagcagctggccgccctgaagaagcaccacgagaacgagatcagccaccacgtgaaggagatc

SEQ ID NO: 1564 - DNA, 309 bp, Artificial Sequence
  Designed; as detailed elsewhere in present application
  CDS (1)..(309)
catcatcatcatcatcatgattataaagatgatgatgataaaggttatggtcgtaaaaaacgtcgtcagcgtcgtcgtggtatggcaggtagcgcactggcagttcgtgcacgttttggtgtttggggtatgaaagttctgcagacccgtggttttagcagcgaagcaaccgtttggaatgcaggtgttgattttcgtaaacgtgaacaggcaaaaggtgaacgttatctgcgtgcacgtgcaaaagaacagctggcagcactgaaaaaacatcatgaaaatgaaattagccatcatgttaaagaaatt

SEQ ID NO: 1565 - DNA, 309 bp, Artificial Sequence
  Designed; as detailed elsewhere in present application
  CDS (1)..(309)
catcatcatcatcatcatgattataaagatgatgatgataaaggttatggtagaaaaaaaagaagacaaagaagaagaggtatggctggttctgctttggctgttagagctagatttggtgtttggggtatgaaagttttgcaaactagaggtttttcttctgaagctactgtttggaatgctggtgttgattttagaaaaagagaacaagctaaaggtgaaagatatttgagagctagagctaaagaacaattggctgctttgaaaaaacatcatgaaaatgaaatttctcatcatgttaaagaaatt

SEQ ID NO: 1566 - DNA, 309 bp, Artificial Sequence
  Designed; as detailed elsewhere in present application
  CDS (1)..(309)
caccaccaccaccaccacgactacaaggacgacgacgacaagggctacggcaggaagaagaggaggcagaggaggaggggcatggccggcagcgccctggccgtgagggccaggttcggcgtgtggggcatgaaggtgctgcagaccaggggcttcagcagcgaggccaccgtgtggaacgccggcgtggacttcaggaagagggagcaggccaagggcgagaggtacctgagggccagggccaaggagcagctggccgccctgaagaagcaccacgagaacgagatcagccaccacgtgaaggagatc

SEQ ID NO: 1567 - DNA, 297 bp, Artificial Sequence
  Designed; as detailed elsewhere in present application
  CDS (1)..(297)
catcatcatcatcatcatgattataaagatgatgatgataaaggttatggtcgtaaaaaacgtcgtcagcgtcgtcgtggtatggcaggtagcgcactggcagttcgtgcacgttttggtgtttggggtatgaaagttctgcagacccgtggttttaccgtttggaatgcaggtgttgattttcgtaaacgtgaacaggcaaaaggtgaacgttatctgcgtgcacgtgcaaaagaacagctggcagcactgaaaaaacatcatgaaaatgaaattagccatcatgttaaagaaatt

SEQ ID NO: 1568 - DNA, 297 bp, Artificial Sequence
  Designed; as detailed elsewhere in present application
  CDS (1)..(297)
catcatcatcatcatcatgattataaagatgatgatgataaaggttatggtagaaaaaaaagaagacaaagaagaagaggtatggctggttctgctttggctgttagagctagatttggtgtttggggtatgaaagttttgcaaactagaggttttactgtttggaatgctggtgttgattttagaaaaagagaacaagctaaaggtgaaagatatttgagagctagagctaaagaacaattggctgctttgaaaaaacatcatgaaaatgaaatttctcatcatgttaaagaaatt

SEQ ID NO: 1569 - DNA, 297 bp, Artificial Sequence
  Designed; as detailed elsewhere in present application
  CDS (1)..(297)
caccaccaccaccaccacgactacaaggacgacgacgacaagggctacggcaggaagaagaggaggcagaggaggaggggcatggccggcagcgccctggccgtgagggccaggttcggcgtgtggggcatgaaggtgctgcagaccaggggcttcaccgtgtggaacgccggcgtggacttcaggaagagggagcaggccaagggcgagaggtacctgagggccagggccaaggagcagctggccgccctgaagaagcaccacgagaacgagatcagccaccacgtgaaggagatc

SEQ ID NO: 1570 - DNA, 261 bp, Artificial Sequence
  Designed; as detailed elsewhere in present application
  CDS (1)..(261)
catcatcatcatcatcatgattataaagatgatgatgataaaggttatggtcgtaaaaaacgtcgtcagcgtcgtcgtggtatggcaggtagcgcactggcagttcgtgcacgttttggtgtttggggtatgaaagttctgcagacccgtggttttgcaaccgtttggaatgcaggtgttgattttcgtaaacgtgaacaggcaaaaggtgaacgttatctgcgtgcacgtgcaaaagaacagctggcagcactgaaaaaa

SEQ ID NO: 1571 - DNA, 261 bp, Artificial Sequence
  Designed; as detailed elsewhere in present application
  CDS (1)..(261)
catcatcatcatcatcatgattataaagatgatgatgataaaggttatggtagaaaaaaaagaagacaaagaagaagaggtatggctggttctgctttggctgttagagctagatttggtgtttggggtatgaaagttttgcaaactagaggttttgctactgtttggaatgctggtgttgattttagaaaaagagaacaagctaaaggtgaaagatatttgagagctagagctaaagaacaattggctgctttgaaaaaa

SEQ ID NO: 1572 - DNA, 261 bp, Artificial Sequence
  Designed; as detailed elsewhere in present application
  CDS (1)..(261)
caccaccaccaccaccacgactacaaggacgacgacgacaagggctacggcaggaagaagaggaggcagaggaggaggggcatggccggcagcgccctggccgtgagggccaggttcggcgtgtggggcatgaaggtgctgcagaccaggggcttcgccaccgtgtggaacgccggcgtggacttcaggaagagggagcaggccaagggcgagaggtacctgagggccagggccaaggagcagctggccgccctgaagaag

SEQ ID NO: 1573 - DNA, 258 bp, Artificial Sequence
  Designed; as detailed elsewhere in present application
  CDS (1)..(258)
catcatcatcatcatcatgattataaagatgatgatgataaaggttatggtcgtaaaaaacgtcgtcagcgtcgtcgtggtatggcaggtagcgcactggcagttcgtgcacgttttggtgtttggggtatgaaagttctgcagacccgtggttttaccgtttggaatgcaggtgttgattttcgtaaacgtgaacaggcaaaaggtgaacgttatctgcgtgcacgtgcaaaagaacagctggcagcactgaaaaaa

SEQ ID NO: 1574 - DNA, 258 bp, Artificial Sequence
  Designed; as detailed elsewhere in present application
  CDS (1)..(258)
catcatcatcatcatcatgattataaagatgatgatgataaaggttatggtagaaaaaaaagaagacaaagaagaagaggtatggctggttctgctttggctgttagagctagatttggtgtttggggtatgaaagttttgcaaactagaggttttactgtttggaatgctggtgttgattttagaaaaagagaacaagctaaaggtgaaagatatttgagagctagagctaaagaacaattggctgctttgaaaaaa

SEQ ID NO: 1575 - DNA, 258 bp, Artificial Sequence
  Designed; as detailed elsewhere in present application
  CDS (1)..(258)
caccaccaccaccaccacgactacaaggacgacgacgacaagggctacggcaggaagaagaggaggcagaggaggaggggcatggccggcagcgccctggccgtgagggccaggttcggcgtgtggggcatgaaggtgctgcagaccaggggcttcaccgtgtggaacgccggcgtggacttcaggaagagggagcaggccaagggcgagaggtacctgagggccagggccaaggagcagctggccgccctgaagaag

SEQ ID NO: 1576 - DNA, 207 bp, Artificial Sequence; identical to SEQ ID NO: 1555
  Designed; as detailed elsewhere in present application
  CDS (1)..(207)

SEQ ID NO: 1577 - DNA, 207 bp, Artificial Sequence; identical to SEQ ID NO: 1556
  Designed; as detailed elsewhere in present application
  CDS (1)..(207)

SEQ ID NO: 1578 - DNA, 207 bp, Artificial Sequence; identical to SEQ ID NO: 1557
  Designed; as detailed elsewhere in present application
  CDS (1)..(207)

SEQ ID NO: 1579 - DNA, 399 bp, Artificial Sequence
  Designed; as detailed elsewhere in present application
  CDS (1)..(399)
catcatcatcatcatcatgattataaagatgatgatgataaaggttatggtcgtaaaaaacgtcgtcagcgtcgtcgtggtatggcaggtagcgcactggcagttcgtgcacgttttggtgtttggggtatgaaagttctgcagacccgtggttttggtagcgatcagagcgaaaatgttgatcgtggtgcaggtagcattcgtgaagcaggtggtgcatttggtaaacgtgaacaggcagaagaagaacgttattttcgtgcacagagccgtgaacagctggcagcactgaaaaaacatcatgaagaagaaattgttcatcataaaaaagaaattgaacgtctgcagaaagaaattgaacgtcataaacagaaaattaaaatgctgaaacatgatgat

SEQ ID NO: 1580 - DNA, 399 bp, Artificial Sequence
  Designed; as detailed elsewhere in present application
  CDS (1)..(399)
catcatcatcatcatcatgattataaagatgatgatgataaaggttatggtagaaaaaaaagaagacaaagaagaagaggtatggctggttctgctttggctgttagagctagatttggtgtttggggtatgaaagttttgcaaactagaggttttggttctgatcaatctgaaaatgttgatagaggtgctggttctattagagaagctggtggtgcttttggtaaaagagaacaagctgaagaagaaagatattttagagctcaatctagagaacaattggctgctttgaaaaaacatcatgaagaagaaattgttcatcataaaaaagaaattgaaagattgcaaaaagaaattgaaagacataaacaaaaaattaaaatgttgaaacatgatgat

SEQ ID NO: 1581 - DNA, 399 bp, Artificial Sequence
  Designed; as detailed elsewhere in present application
  CDS (1)..(399)
caccaccaccaccaccacgactacaaggacgacgacgacaagggctacggcaggaagaagaggaggcagaggaggaggggcatggccggcagcgccctggccgtgagggccaggttcggcgtgtggggcatgaaggtgctgcagaccaggggcttcggcagcgaccagagcgagaacgtggacaggggcgccggcagcatcagggaggccggcggcgccttcggcaagagggagcaggccgaggaggagaggtacttcagggcccagagcagggagcagctggccgccctgaagaagcaccacgaggaggagatcgtgcaccacaagaaggagatcgagaggctgcagaaggagatcgagaggcacaagcagaagatcaagatgctgaagcacgacgac

SEQ ID NO: 1582 - DNA, 336 bp, Artificial Sequence
  Designed; as detailed elsewhere in present application
  CDS (1)..(336)
catcatcatcatcatcatgattataaagatgatgatgataaaggttatggtcgtaaaaaacgtcgtcagcgtcgtcgtggtatggcaggtagcgcactggcagttcgtgcacgttttggtgtttggggtatgaaagttctgcagacccgtggttttggtagcgatcagagcgaaaatgttgatcgtggtgcaggtagcattcgtgaagcaggtggtgcatttggtaaacgtgaacaggcagaagaagaacgttattttcgtgcacagagccgtgaacagctggcagcactgaaaaaacatcatgaagaagaaattgttcatcataaaaaagaaatt

SEQ ID NO: 1583 - DNA, 336 bp, Artificial Sequence
  Designed; as detailed elsewhere in present application
  CDS (1)..(336)
catcatcatcatcatcatgattataaagatgatgatgataaaggttatggtagaaaaaaaagaagacaaagaagaagaggtatggctggttctgctttggctgttagagctagatttggtgtttggggtatgaaagttttgcaaactagaggttttggttctgatcaatctgaaaatgttgatagaggtgctggttctattagagaagctggtggtgcttttggtaaaagagaacaagctgaagaagaaagatattttagagctcaatctagagaacaattggctgctttgaaaaaacatcatgaagaagaaattgttcatcataaaaaagaaatt

SEQ ID NO: 1584 - DNA, 336 bp, Artificial Sequence
  Designed; as detailed elsewhere in present application
  CDS (1)..(336)
caccaccaccaccaccacgactacaaggacgacgacgacaagggctacggcaggaagaagaggaggcagaggaggaggggcatggccggcagcgccctggccgtgagggccaggttcggcgtgtggggcatgaaggtgctgcagaccaggggcttcggcagcgaccagagcgagaacgtggacaggggcgccggcagcatcagggaggccggcggcgccttcggcaagagggagcaggccgaggaggagaggtacttcagggcccagagcagggagcagctggccgccctgaagaagcaccacgaggaggagatcgtgcaccacaagaaggagatc

SEQ ID NO: 1585 - DNA, 309 bp, Artificial Sequence
  Designed; as detailed elsewhere in present application
  CDS (1)..(309)
catcatcatcatcatcatgattataaagatgatgatgataaaggttatggtcgtaaaaaacgtcgtcagcgtcgtcgtggtatggcaggtagcgcactggcagttcgtgcacgttttggtgtttggggtatgaaagttctgcagacccgtggttttcgtggtgcaggtagcattcgtgaagcaggtggtgcatttggtaaacgtgaacaggcagaagaagaacgttattttcgtgcacagagccgtgaacagctggcagcactgaaaaaacatcatgaagaagaaattgttcatcataaaaaagaaatt

SEQ ID NO: 1586 - DNA, 309 bp, Artificial Sequence
  Designed; as detailed elsewhere in present application
  CDS (1)..(309)
catcatcatcatcatcatgattataaagatgatgatgataaaggttatggtagaaaaaaaagaagacaaagaagaagaggtatggctggttctgctttggctgttagagctagatttggtgtttggggtatgaaagttttgcaaactagaggttttagaggtgctggttctattagagaagctggtggtgcttttggtaaaagagaacaagctgaagaagaaagatattttagagctcaatctagagaacaattggctgctttgaaaaaacatcatgaagaagaaattgttcatcataaaaaagaaatt

SEQ ID NO: 1587 - DNA, 309 bp, Artificial Sequence
  Designed; as detailed elsewhere in present application
caccaccaccaccaccacgactacaaggacgacgacgacaagggctacggcaggaagaagaggaggcagaggaggaggggcatggccggcagcgccctggccgtgagggccaggttcggcgtgtggggcatgaaggtgctgcagaccaggggcttcaggggcgccggcagcatcagggaggccggcggcgccttcggcaagagggagcaggccgaggaggagaggtacttcagggcccagagcagggagcagctggccgccctgaagaagcaccacgaggaggagatcgtgcaccacaagaaggagatc

SEQ ID NO: 1588 - DNA, 297 bp, Artificial Sequence
  Designed; as detailed elsewhere in present application
  CDS (1)..(297)
catcatcatcatcatcatgattataaagatgatgatgataaaggttatggtcgtaaaaaacgtcgtcagcgtcgtcgtggtatggcaggtagcgcactggcagttcgtgcacgttttggtgtttggggtatgaaagttctgcagacccgtggttttagcattcgtgaagcaggtggtgcatttggtaaacgtgaacaggcagaagaagaacgttattttcgtgcacagagccgtgaacagctggcagcactgaaaaaacatcatgaagaagaaattgttcatcataaaaaagaaatt

SEQ ID NO: 1589 - DNA, 297 bp, Artificial Sequence
  Designed; as detailed elsewhere in present application
  CDS (1)..(297)
catcatcatcatcatcatgattataaagatgatgatgataaaggttatggtagaaaaaaaagaagacaaagaagaagaggtatggctggttctgctttggctgttagagctagatttggtgtttggggtatgaaagttttgcaaactagaggtttttctattagagaagctggtggtgcttttggtaaaagagaacaagctgaagaagaaagatattttagagctcaatctagagaacaattggctgctttgaaaaaacatcatgaagaagaaattgttcatcataaaaaagaaatt

SEQ ID NO: 1590 - DNA, 297 bp, Artificial Sequence
  Designed; as detailed elsewhere in present application
  CDS (1)..(297)
caccaccaccaccaccacgactacaaggacgacgacgacaagggctacggcaggaagaagaggaggcagaggaggaggggcatggccggcagcgccctggccgtgagggccaggttcggcgtgtggggcatgaaggtgctgcagaccaggggcttcagcatcagggaggccggcggcgccttcggcaagagggagcaggccgaggaggagaggtacttcagggcccagagcagggagcagctggccgccctgaagaagcaccacgaggaggagatcgtgcaccacaagaaggagatc

SEQ ID NO: 1591 - DNA, 261 bp, Artificial Sequence
  Designed; as detailed elsewhere in present application
  CDS (1)..(261)
catcatcatcatcatcatgattataaagatgatgatgataaaggttatggtcgtaaaaaacgtcgtcagcgtcgtcgtggtatggcaggtagcgcactggcagttcgtgcacgttttggtgtttggggtatgaaagttctgcagacccgtggttttggtagcattcgtgaagcaggtggtgcatttggtaaacgtgaacaggcagaagaagaacgttattttcgtgcacagagccgtgaacagctggcagcactgaaaaaa

SEQ ID NO: 1592 - DNA, 261 bp, Artificial Sequence
  Designed; as detailed elsewhere in present application
  CDS (1)..(261): Designed; as detailed elsewhere in present application
catcatcatcatcatcatgattataaagatgatgatgataaaggttatggtagaaaaaaaagaagacaaagaagaagaggtatggctggttctgctttggctgttagagctagatttggtgtttggggtatgaaagttttgcaaactagaggttttggttctattagagaagctggtggtgcttttggtaaaagagaacaagctgaagaagaaagatattttagagctcaatctagagaacaattggctgctttgaaaaaa

SEQ ID NO: 1593 - DNA, 261 bp, Artificial Sequence
  Designed; as detailed elsewhere in present application
  CDS (1)..(261)
caccaccaccaccaccacgactacaaggacgacgacgacaagggctacggcaggaagaagaggaggcagaggaggaggggcatggccggcagcgccctggccgtgagggccaggttcggcgtgtggggcatgaaggtgctgcagaccaggggcttcggcagcatcagggaggccggcggcgccttcggcaagagggagcaggccgaggaggagaggtacttcagggcccagagcagggagcagctggccgccctgaagaag

SEQ ID NO: 1594 - DNA, 258 bp, Artificial Sequence
  Designed; as detailed elsewhere in present application
  CDS (1)..(258)
catcatcatcatcatcatgattataaagatgatgatgataaaggttatggtcgtaaaaaacgtcgtcagcgtcgtcgtggtatggcaggtagcgcactggcagttcgtgcacgttttggtgtttggggtatgaaagttctgcagacccgtggttttagcattcgtgaagcaggtggtgcatttggtaaacgtgaacaggcagaagaagaacgttattttcgtgcacagagccgtgaacagctggcagcactgaaaaaa

SEQ ID NO: 1595 - DNA, 258 bp, Artificial Sequence
  Designed; as detailed elsewhere in present application
  CDS (1)..(258)
catcatcatcatcatcatgattataaagatgatgatgataaaggttatggtagaaaaaaaagaagacaaagaagaagaggtatggctggttctgctttggctgttagagctagatttggtgtttggggtatgaaagttttgcaaactagaggtttttctattagagaagctggtggtgcttttggtaaaagagaacaagctgaagaagaaagatattttagagctcaatctagagaacaattggctgctttgaaaaaa

SEQ ID NO: 1596 - DNA, 258 bp, Artificial Sequence
  Designed; as detailed elsewhere in present application
  CDS (1)..(258)
caccaccaccaccaccacgactacaaggacgacgacgacaagggctacggcaggaagaagaggaggcagaggaggaggggcatggccggcagcgccctggccgtgagggccaggttcggcgtgtggggcatgaaggtgctgcagaccaggggcttcagcatcagggaggccggcggcgccttcggcaagagggagcaggccgaggaggagaggtacttcagggcccagagcagggagcagctggccgccctgaagaag

SEQ ID NO: 1597 - DNA, 207 bp, Artificial Sequence
  Designed; as detailed elsewhere in present application
  CDS (1)..(207)
catcatcatcatcatcatgattataaagatgatgatgataaaggttatggtcgtaaaaaacgtcgtcagcgtcgtcgtggtatggcaggtagcgcactggcagttcgtgcacgttttggtgtttggggtatgaaagttctgcagacccgtggttttctggcagcactgaaaaaacatcatgaagaagaaattgttcatcataaaaaa

SEQ ID NO: 1598 - DNA, 207 bp, Artificial Sequence
  Designed; as detailed elsewhere in present application
  CDS (1)..(207)
catcatcatcatcatcatgattataaagatgatgatgataaaggttatggtagaaaaaaaagaagacaaagaagaagaggtatggctggttctgctttggctgttagagctagatttggtgtttggggtatgaaagttttgcaaactagaggttttttggctgctttgaaaaaacatcatgaagaagaaattgttcatcataaaaaa

SEQ ID NO: 1599 - DNA, 207 bp, Artificial Sequence
  Designed; as detailed elsewhere in present application
  CDS (1)..(207)
caccaccaccaccaccacgactacaaggacgacgacgacaagggctacggcaggaagaagaggaggcagaggaggaggggcatggccggcagcgccctggccgtgagggccaggttcggcgtgtggggcatgaaggtgctgcagaccaggggcttcctggccgccctgaagaagcaccacgaggaggagatcgtgcaccacaagaag

SEQ ID NO: 1600 - DNA, 402 bp, Artificial Sequence
  Designed; as detailed elsewhere in present application
  CDS (1)..(402)
catcatcatcatcatcatgattataaagatgatgatgataaaggttatggtcgtaaaaaacgtcgtcagcgtcgtcgtggtatggcaggtagcgcactggcagttcgtgcacgttttggtgtttggggtatgaaagttctgcagacccgtggttttggtagcgaaagcgcagataatctgggtagcagcgcaggtgcaattcgtgatgcaggtggtgcatttggtaaaaaagaacaggcagaagaagaacgttattttcgtgcacgtgcaaaagaacagctggcagcactgaaaaaacataaagaaaatgaaattagccatcatgttaaagaaattgaacatctgcagaaagaaattgaacgtcataaacagagcattaaaaaactgaaacatgatgatgat

SEQ ID NO: 1601 - DNA, 402 bp, Artificial Sequence
  Designed; as detailed elsewhere in present application
  CDS (1)..(402)
catcatcatcatcatcatgattataaagatgatgatgataaaggttatggtagaaaaaaaagaagacaaagaagaagaggtatggctggttctgctttggctgttagagctagatttggtgtttggggtatgaaagttttgcaaactagaggttttggttctgaatctgctgataatttgggttcttctgctggtgctattagagatgctggtggtgcttttggtaaaaaagaacaagctgaagaagaaagatattttagagctagagctaaagaacaattggctgctttgaaaaaacataaagaaaatgaaatttctcatcatgttaaagaaattgaacatttgcaaaaagaaattgaaagacataaacaatctattaaaaaattgaaacatgatgatgat

SEQ ID NO: 1602 - DNA, 402 bp, Artificial Sequence
  Designed; as detailed elsewhere in present application
  CDS (1)..(402)
caccaccaccaccaccacgactacaaggacgacgacgacaagggctacggcaggaagaagaggaggcagaggaggaggggcatggccggcagcgccctggccgtgagggccaggttcggcgtgtggggcatgaaggtgctgcagaccaggggcttcggcagcgagagcgccgacaacctgggcagcagcgccggcgccatcagggacgccggcggcgccttcggcaagaaggagcaggccgaggaggagaggtacttcagggccagggccaaggagcagctggccgccctgaagaagcacaaggagaacgagatcagccaccacgtgaaggagatcgagcacctgcagaaggagatcgagaggcacaagcagagcatcaagaagctgaagcacgacgacgac

SEQ ID NO: 1603 - DNA, 336 bp, Artificial Sequence
  Designed; as detailed elsewhere in present application
  CDS (1)..(336)
catcatcatcatcatcatgattataaagatgatgatgataaaggttatggtcgtaaaaaacgtcgtcagcgtcgtcgtggtatggcaggtagcgcactggcagttcgtgcacgttttggtgtttggggtatgaaagttctgcagacccgtggttttggtagcgaaagcgcagataatctgggtagcagcgcaggtgcaattcgtgatgcaggtggtgcatttggtaaaaaagaacaggcagaagaagaacgttattttcgtgcacgtgcaaaagaacagctggcagcactgaaaaaacataaagaaaatgaaattagccatcatgttaaagaaatt

SEQ ID NO: 1604 - DNA, 336 bp, Artificial Sequence
  Designed; as detailed elsewhere in present application
  CDS (1)..(336)
catcatcatcatcatcatgattataaagatgatgatgataaaggttatggtagaaaaaaaagaagacaaagaagaagaggtatggctggttctgctttggctgttagagctagatttggtgtttggggtatgaaagttttgcaaactagaggttttggttctgaatctgctgataatttgggttcttctgctggtgctattagagatgctggtggtgcttttggtaaaaaagaacaagctgaagaagaaagatattttagagctagagctaaagaacaattggctgctttgaaaaaacataaagaaaatgaaatttctcatcatgttaaagaaatt

SEQ ID NO: 1605 - DNA, 336 bp, Artificial Sequence
  Designed; as detailed elsewhere in present application
  CDS (1)..(336)
caccaccaccaccaccacgactacaaggacgacgacgacaagggctacggcaggaagaagaggaggcagaggaggaggggcatggccggcagcgccctggccgtgagggccaggttcggcgtgtggggcatgaaggtgctgcagaccaggggcttcggcagcgagagcgccgacaacctgggcagcagcgccggcgccatcagggacgccggcggcgccttcggcaagaaggagcaggccgaggaggagaggtacttcagggccagggccaaggagcagctggccgccctgaagaagcacaaggagaacgagatcagccaccacgtgaaggagatc

SEQ ID NO: 1606 - DNA, 309 bp, Artificial Sequence
  Designed; as detailed elsewhere in present application
  CDS (1)..(309)
catcatcatcatcatcatgattataaagatgatgatgataaaggttatggtcgtaaaaaacgtcgtcagcgtcgtcgtggtatggcaggtagcgcactggcagttcgtgcacgttttggtgtttggggtatgaaagttctgcagacccgtggttttagcagcgcaggtgcaattcgtgatgcaggtggtgcatttggtaaaaaagaacaggcagaagaagaacgttattttcgtgcacgtgcaaaagaacagctggcagcactgaaaaaacataaagaaaatgaaattagccatcatgttaaagaaatt

SEQ ID NO: 1607 - DNA, 309 bp, Artificial Sequence
  Designed; as detailed elsewhere in present application
  CDS (1)..(309)
catcatcatcatcatcatgattataaagatgatgatgataaaggttatggtagaaaaaaaagaagacaaagaagaagaggtatggctggttctgctttggctgttagagctagatttggtgtttggggtatgaaagttttgcaaactagaggtttttcttctgctggtgctattagagatgctggtggtgcttttggtaaaaaagaacaagctgaagaagaaagatattttagagctagagctaaagaacaattggctgctttgaaaaaacataaagaaaatgaaatttctcatcatgttaaagaaatt

SEQ ID NO: 1608 - DNA, 309 bp, Artificial Sequence
  Designed; as detailed elsewhere in present application
  CDS (1)..(309)
caccaccaccaccaccacgactacaaggacgacgacgacaagggctacggcaggaagaagaggaggcagaggaggaggggcatggccggcagcgccctggccgtgagggccaggttcggcgtgtggggcatgaaggtgctgcagaccaggggcttcagcagcgccggcgccatcagggacgccggcggcgccttcggcaagaaggagcaggccgaggaggagaggtacttcagggccagggccaaggagcagctggccgccctgaagaagcacaaggagaacgagatcagccaccacgtgaaggagatc

SEQ ID NO: 1609 - DNA, 297 bp, Artificial Sequence
  Designed; as detailed elsewhere in present application
  CDS (1)..(297)
catcatcatcatcatcatgattataaagatgatgatgataaaggttatggtcgtaaaaaacgtcgtcagcgtcgtcgtggtatggcaggtagcgcactggcagttcgtgcacgttttggtgtttggggtatgaaagttctgcagacccgtggttttgcaattcgtgatgcaggtggtgcatttggtaaaaaagaacaggcagaagaagaacgttattttcgtgcacgtgcaaaagaacagctggcagcactgaaaaaacataaagaaaatgaaattagccatcatgttaaagaaatt

SEQ ID NO: 1610 - DNA, 297 bp, Artificial Sequence
  Designed; as detailed elsewhere in present application
  CDS (1)..(297)
catcatcatcatcatcatgattataaagatgatgatgataaaggttatggtagaaaaaaaagaagacaaagaagaagaggtatggctggttctgctttggctgttagagctagatttggtgtttggggtatgaaagttttgcaaactagaggttttgctattagagatgctggtggtgcttttggtaaaaaagaacaagctgaagaagaaagatattttagagctagagctaaagaacaattggctgctttgaaaaaacataaagaaaatgaaatttctcatcatgttaaagaaatt

SEQ ID NO: 1611 - DNA, 297 bp, Artificial Sequence
  Designed; as detailed elsewhere in present application
  CDS (1)..(297)
caccaccaccaccaccacgactacaaggacgacgacgacaagggctacggcaggaagaagaggaggcagaggaggaggggcatggccggcagcgccctggccgtgagggccaggttcggcgtgtggggcatgaaggtgctgcagaccaggggcttcgccatcagggacgccggcggcgccttcggcaagaaggagcaggccgaggaggagaggtacttcagggccagggccaaggagcagctggccgccctgaagaagcacaaggagaacgagatcagccaccacgtgaaggagatc

SEQ ID NO: 1612 - DNA, 402 bp, Artificial Sequence
  Designed; as detailed elsewhere in present application
  CDS (1)..(402)
catcatcatcatcatcatgattataaagatgatgatgataaaggttatggtcgtaaaaaacgtcgtcagcgtcgtcgtggtatggcaggtagcgcactggcagttcgtgcacgttttggtgtttggggtatgaaagttctgcagacccgtggttttggtagcgaaccggcagataatctgggtagcagcgaagcagcagtttggaatgcaggtgttgattttcgtaaacgtgaacaggcaaaaggtgaacgttatctgcgtgcacgtgcaaaagaacagctggcagcactgaaaaaacataaagaaaatgaaattagccatcatgttaaagaaattgaacatctgcagaaagaaattgaacgtcataaacagagcattaaaaaactgaaacatgatgatgat

SEQ ID NO: 1613 - DNA, 402 bp, Artificial Sequence
  Designed; as detailed elsewhere in present application
  CDS (1)..(402)
catcatcatcatcatcatgattataaagatgatgatgataaaggttatggtagaaaaaaaagaagacaaagaagaagaggtatggctggttctgctttggctgttagagctagatttggtgtttggggtatgaaagttttgcaaactagaggttttggttctgaaccagctgataatttgggttcttctgaagctgctgtttggaatgctggtgttgattttagaaaaagagaacaagctaaaggtgaaagatatttgagagctagagctaaagaacaattggctgctttgaaaaaacataaagaaaatgaaatttctcatcatgttaaagaaattgaacatttgcaaaaagaaattgaaagacataaacaatctattaaaaaattgaaacatgatgatgat

SEQ ID NO: 1614 - DNA, 402 bp, Artificial Sequence
  Designed; as detailed elsewhere in present application
  CDS (1)..(402)
caccaccaccaccaccacgactacaaggacgacgacgacaagggctacggcaggaagaagaggaggcagaggaggaggggcatggccggcagcgccctggccgtgagggccaggttcggcgtgtggggcatgaaggtgctgcagaccaggggcttcggcagcgagcctgccgacaacctgggcagcagcgaggccgccgtgtggaacgccggcgtggacttcaggaagagggagcaggccaagggcgagaggtacctgagggccagggccaaggagcagctggccgccctgaagaagcacaaggagaacgagatcagccaccacgtgaaggagatcgagcacctgcagaaggagatcgagaggcacaagcagagcatcaagaagctgaagcacgacgacgac

SEQ ID NO: 1615 - DNA, 336 bp, Artificial Sequence
  Designed; as detailed elsewhere in present application
  CDS (1)..(336)
catcatcatcatcatcatgattataaagatgatgatgataaaggttatggtcgtaaaaaacgtcgtcagcgtcgtcgtggtatggcaggtagcgcactggcagttcgtgcacgttttggtgtttggggtatgaaagttctgcagacccgtggttttggtagcgaaccggcagataatctgggtagcagcgaagcagcagtttggaatgcaggtgttgattttcgtaaacgtgaacaggcaaaaggtgaacgttatctgcgtgcacgtgcaaaagaacagctggcagcactgaaaaaacataaagaaaatgaaattagccatcatgttaaagaaatt

SEQ ID NO: 1616 - DNA, 336 bp, Artificial Sequence
  Designed; as detailed elsewhere in present application
  CDS (1)..(336)
catcatcatcatcatcatgattataaagatgatgatgataaaggttatggtagaaaaaaaagaagacaaagaagaagaggtatggctggttctgctttggctgttagagctagatttggtgtttggggtatgaaagttttgcaaactagaggttttggttctgaaccagctgataatttgggttcttctgaagctgctgtttggaatgctggtgttgattttagaaaaagagaacaagctaaaggtgaaagatatttgagagctagagctaaagaacaattggctgctttgaaaaaacataaagaaaatgaaatttctcatcatgttaaagaaatt

SEQ ID NO: 1617 - DNA, 336 bp, Artificial Sequence
  Designed; as detailed elsewhere in present application
  CDS (1)..(336)
caccaccaccaccaccacgactacaaggacgacgacgacaagggctacggcaggaagaagaggaggcagaggaggaggggcatggccggcagcgccctggccgtgagggccaggttcggcgtgtggggcatgaaggtgctgcagaccaggggcttcggcagcgagcctgccgacaacctgggcagcagcgaggccgccgtgtggaacgccggcgtggacttcaggaagagggagcaggccaagggcgagaggtacctgagggccagggccaaggagcagctggccgccctgaagaagcacaaggagaacgagatcagccaccacgtgaaggagatc

SEQ ID NO: 1618 - DNA, 309 bp, Artificial Sequence
  Designed; as detailed elsewhere in present application
  CDS (1)..(309)
catcatcatcatcatcatgattataaagatgatgatgataaaggttatggtcgtaaaaaacgtcgtcagcgtcgtcgtggtatggcaggtagcgcactggcagttcgtgcacgttttggtgtttggggtatgaaagttctgcagacccgtggttttagcagcgaagcagcagtttggaatgcaggtgttgattttcgtaaacgtgaacaggcaaaaggtgaacgttatctgcgtgcacgtgcaaaagaacagctggcagcactgaaaaaacataaagaaaatgaaattagccatcatgttaaagaaatt

SEQ ID NO: 1619 - DNA, 309 bp, Artificial Sequence
  Designed; as detailed elsewhere in present application
  CDS (1)..(309)
catcatcatcatcatcatgattataaagatgatgatgataaaggttatggtagaaaaaaaagaagacaaagaagaagaggtatggctggttctgctttggctgttagagctagatttggtgtttggggtatgaaagttttgcaaactagaggtttttcttctgaagctgctgtttggaatgctggtgttgattttagaaaaagagaacaagctaaaggtgaaagatatttgagagctagagctaaagaacaattggctgctttgaaaaaacataaagaaaatgaaatttctcatcatgttaaagaaatt

SEQ ID NO: 1620 - DNA, 309 bp, Artificial Sequence
  Designed; as detailed elsewhere in present application
  CDS (1)..(309)
caccaccaccaccaccacgactacaaggacgacgacgacaagggctacggcaggaagaagaggaggcagaggaggaggggcatggccggcagcgccctggccgtgagggccaggttcggcgtgtggggcatgaaggtgctgcagaccaggggcttcagcagcgaggccgccgtgtggaacgccggcgtggacttcaggaagagggagcaggccaagggcgagaggtacctgagggccagggccaaggagcagctggccgccctgaagaagcacaaggagaacgagatcagccaccacgtgaaggagatc

SEQ ID NO: 1621 - DNA, 297 bp, Artificial Sequence
  Designed; as detailed elsewhere in present application
  CDS (1)..(297)
catcatcatcatcatcatgattataaagatgatgatgataaaggttatggtcgtaaaaaacgtcgtcagcgtcgtcgtggtatggcaggtagcgcactggcagttcgtgcacgttttggtgtttggggtatgaaagttctgcagacccgtggttttgcagtttggaatgcaggtgttgattttcgtaaacgtgaacaggcaaaaggtgaacgttatctgcgtgcacgtgcaaaagaacagctggcagcactgaaaaaacataaagaaaatgaaattagccatcatgttaaagaaatt

SEQ ID NO: 1622 - DNA, 297 bp, Artificial Sequence
  Designed; as detailed elsewhere in present application
  CDS (1)..(297)
catcatcatcatcatcatgattataaagatgatgatgataaaggttatggtagaaaaaaaagaagacaaagaagaagaggtatggctggttctgctttggctgttagagctagatttggtgtttggggtatgaaagttttgcaaactagaggttttgctgtttggaatgctggtgttgattttagaaaaagagaacaagctaaaggtgaaagatatttgagagctagagctaaagaacaattggctgctttgaaaaaacataaagaaaatgaaatttctcatcatgttaaagaaatt

SEQ ID NO: 1623 - DNA, 297 bp, Artificial Sequence
  Designed; as detailed elsewhere in present application
  CDS (1)..(297)
caccaccaccaccaccacgactacaaggacgacgacgacaagggctacggcaggaagaagaggaggcagaggaggaggggcatggccggcagcgccctggccgtgagggccaggttcggcgtgtggggcatgaaggtgctgcagaccaggggcttcgccgtgtggaacgccggcgtggacttcaggaagagggagcaggccaagggcgagaggtacctgagggccagggccaaggagcagctggccgccctgaagaagcacaaggagaacgagatcagccaccacgtgaaggagatc

SEQ ID NO: 1624 - DNA, 261 bp, Artificial Sequence
  Designed; as detailed elsewhere in present application
  CDS (1)..(261)
catcatcatcatcatcatgattataaagatgatgatgataaaggttatggtcgtaaaaaacgtcgtcagcgtcgtcgtggtatggcaggtagcgcactggcagttcgtgcacgttttggtgtttggggtatgaaagttctgcagacccgtggttttgcagcagtttggaatgcaggtgttgattttcgtaaacgtgaacaggcaaaaggtgaacgttatctgcgtgcacgtgcaaaagaacagctggcagcactgaaaaaa

SEQ ID NO: 1625 - DNA, 261 bp, Artificial Sequence
  Designed; as detailed elsewhere in present application
  CDS (1)..(261)
catcatcatcatcatcatgattataaagatgatgatgataaaggttatggtagaaaaaaaagaagacaaagaagaagaggtatggctggttctgctttggctgttagagctagatttggtgtttggggtatgaaagttttgcaaactagaggttttgctgctgtttggaatgctggtgttgattttagaaaaagagaacaagctaaaggtgaaagatatttgagagctagagctaaagaacaattggctgctttgaaaaaa

SEQ ID NO: 1626 - DNA, 261 bp, Artificial Sequence
  Designed; as detailed elsewhere in present application
  CDS (1)..(261)
caccaccaccaccaccacgactacaaggacgacgacgacaagggctacggcaggaagaagaggaggcagaggaggaggggcatggccggcagcgccctggccgtgagggccaggttcggcgtgtggggcatgaaggtgctgcagaccaggggcttcgccgccgtgtggaacgccggcgtggacttcaggaagagggagcaggccaagggcgagaggtacctgagggccagggccaaggagcagctggccgccctgaagaag

SEQ ID NO: 1627 - DNA, 258 bp, Artificial Sequence
  Designed; as detailed elsewhere in present application
  CDS (1)..(258)
catcatcatcatcatcatgattataaagatgatgatgataaaggttatggtcgtaaaaaacgtcgtcagcgtcgtcgtggtatggcaggtagcgcactggcagttcgtgcacgttttggtgtttggggtatgaaagttctgcagacccgtggttttgcagtttggaatgcaggtgttgattttcgtaaacgtgaacaggcaaaaggtgaacgttatctgcgtgcacgtgcaaaagaacagctggcagcactgaaaaaa

SEQ ID NO: 1628 - DNA, 258 bp, Artificial Sequence
  Designed; as detailed elsewhere in present application
  CDS (1)..(258)
catcatcatcatcatcatgattataaagatgatgatgataaaggttatggtagaaaaaaaagaagacaaagaagaagaggtatggctggttctgctttggctgttagagctagatttggtgtttggggtatgaaagttttgcaaactagaggttttgctgtttggaatgctggtgttgattttagaaaaagagaacaagctaaaggtgaaagatatttgagagctagagctaaagaacaattggctgctttgaaaaaa

SEQ ID NO: 1629 - DNA, 258 bp, Artificial Sequence
  Designed; as detailed elsewhere in present application
  CDS (1)..(258)
caccaccaccaccaccacgactacaaggacgacgacgacaagggctacggcaggaagaagaggaggcagaggaggaggggcatggccggcagcgccctggccgtgagggccaggttcggcgtgtggggcatgaaggtgctgcagaccaggggcttcgccgtgtggaacgccggcgtggacttcaggaagagggagcaggccaagggcgagaggtacctgagggccagggccaaggagcagctggccgccctgaagaag

SEQ ID NO: 1630 - DNA, 399 bp, Artificial Sequence
  Designed; as detailed elsewhere in present application
  CDS (1)..(399)
catcatcatcatcatcatgattataaagatgatgatgataaaggttatggtcgtaaaaaacgtcgtcagcgtcgtcgtggtatggcaggtagcgcactggcagttcgtgcacgttttggtgtttggggtatgaaagttctgcagacccgtggttttggtagcgatcagagcgaaaatgttgatcgtggtgcaggtgcaattcgtgaagcaggtggtgcatttggtaaacgtgaacaggcagaagaagaacgttattttcgtgcacagagccgtgaacagctggcagcactgaaaaaacataaagaagaagaaattgttcatcataaaaaagaaattgaacgtctgcagaaagaaattgaacgtcataaacagaaaattaaaatgctgaaacatgatgat

SEQ ID NO: 1631 - DNA, 399 bp, Artificial Sequence
  Designed; as detailed elsewhere in present application
  CDS (1)..(399)
catcatcatcatcatcatgattataaagatgatgatgataaaggttatggtagaaaaaaaagaagacaaagaagaagaggtatggctggttctgctttggctgttagagctagatttggtgtttggggtatgaaagttttgcaaactagaggttttggttctgatcaatctgaaaatgttgatagaggtgctggtgctattagagaagctggtggtgcttttggtaaaagagaacaagctgaagaagaaagatattttagagctcaatctagagaacaattggctgctttgaaaaaacataaagaagaagaaattgttcatcataaaaaagaaattgaaagattgcaaaaagaaattgaaagacataaacaaaaaattaaaatgttgaaacatgatgat

SEQ ID NO: 1632 - DNA, 399 bp, Artificial Sequence
  Designed; as detailed elsewhere in present application
  CDS (1)..(399)
caccaccaccaccaccacgactacaaggacgacgacgacaagggctacggcaggaagaagaggaggcagaggaggaggggcatggccggcagcgccctggccgtgagggccaggttcggcgtgtggggcatgaaggtgctgcagaccaggggcttcggcagcgaccagagcgagaacgtggacaggggcgccggcgccatcagggaggccggcggcgccttcggcaagagggagcaggccgaggaggagaggtacttcagggcccagagcagggagcagctggccgccctgaagaagcacaaggaggaggagatcgtgcaccacaagaaggagatcgagaggctgcagaaggagatcgagaggcacaagcagaagatcaagatgctgaagcacgacgac

SEQ ID NO: 1633 - DNA, 336 bp, Artificial Sequence
  Designed; as detailed elsewhere in present application
  CDS (1)..(336)
catcatcatcatcatcatgattataaagatgatgatgataaaggttatggtcgtaaaaaacgtcgtcagcgtcgtcgtggtatggcaggtagcgcactggcagttcgtgcacgttttggtgtttggggtatgaaagttctgcagacccgtggttttggtagcgatcagagcgaaaatgttgatcgtggtgcaggtgcaattcgtgaagcaggtggtgcatttggtaaacgtgaacaggcagaagaagaacgttattttcgtgcacagagccgtgaacagctggcagcactgaaaaaacataaagaagaagaaattgttcatcataaaaaagaaatt

SEQ ID NO: 1634 - DNA, 336 bp, Artificial Sequence
  Designed; as detailed elsewhere in present application
  CDS (1)..(336)
catcatcatcatcatcatgattataaagatgatgatgataaaggttatggtagaaaaaaaagaagacaaagaagaagaggtatggctggttctgctttggctgttagagctagatttggtgtttggggtatgaaagttttgcaaactagaggttttggttctgatcaatctgaaaatgttgatagaggtgctggtgctattagagaagctggtggtgcttttggtaaaagagaacaagctgaagaagaaagatattttagagctcaatctagagaacaattggctgctttgaaaaaacataaagaagaagaaattgttcatcataaaaaagaaatt

SEQ ID NO: 1635 - DNA, 336 bp, Artificial Sequence
  Designed; as detailed elsewhere in present application
  CDS (1)..(336)
caccaccaccaccaccacgactacaaggacgacgacgacaagggctacggcaggaagaagaggaggcagaggaggaggggcatggccggcagcgccctggccgtgagggccaggttcggcgtgtggggcatgaaggtgctgcagaccaggggcttcggcagcgaccagagcgagaacgtggacaggggcgccggcgccatcagggaggccggcggcgccttcggcaagagggagcaggccgaggaggagaggtacttcagggcccagagcagggagcagctggccgccctgaagaagcacaaggaggaggagatcgtgcaccacaagaaggagatc

SEQ ID NO: 1636 - DNA, 309 bp, Artificial Sequence
  Designed; as detailed elsewhere in present application
  CDS (1)..(309)
catcatcatcatcatcatgattataaagatgatgatgataaaggttatggtcgtaaaaaacgtcgtcagcgtcgtcgtggtatggcaggtagcgcactggcagttcgtgcacgttttggtgtttggggtatgaaagttctgcagacccgtggttttcgtggtgcaggtgcaattcgtgaagcaggtggtgcatttggtaaacgtgaacaggcagaagaagaacgttattttcgtgcacagagccgtgaacagctggcagcactgaaaaaacataaagaagaagaaattgttcatcataaaaaagaaatt

SEQ ID NO: 1637 - DNA, 309 bp, Artificial Sequence
  Designed; as detailed elsewhere in present application
  CDS (1)..(309)
catcatcatcatcatcatgattataaagatgatgatgataaaggttatggtagaaaaaaaagaagacaaagaagaagaggtatggctggttctgctttggctgttagagctagatttggtgtttggggtatgaaagttttgcaaactagaggttttagaggtgctggtgctattagagaagctggtggtgcttttggtaaaagagaacaagctgaagaagaaagatattttagagctcaatctagagaacaattggctgctttgaaaaaacataaagaagaagaaattgttcatcataaaaaagaaatt

SEQ ID NO: 1638 - DNA, 309 bp, Artificial Sequence
  Designed; as detailed elsewhere in present application
  CDS (1)..(309)
caccaccaccaccaccacgactacaaggacgacgacgacaagggctacggcaggaagaagaggaggcagaggaggaggggcatggccggcagcgccctggccgtgagggccaggttcggcgtgtggggcatgaaggtgctgcagaccaggggcttcaggggcgccggcgccatcagggaggccggcggcgccttcggcaagagggagcaggccgaggaggagaggtacttcagggcccagagcagggagcagctggccgccctgaagaagcacaaggaggaggagatcgtgcaccacaagaaggagatc

SEQ ID NO: 1639 - DNA, 297 bp, Artificial Sequence
  Designed; as detailed elsewhere in present application
  CDS (1)..(297)
catcatcatcatcatcatgattataaagatgatgatgataaaggttatggtcgtaaaaaacgtcgtcagcgtcgtcgtggtatggcaggtagcgcactggcagttcgtgcacgttttggtgtttggggtatgaaagttctgcagacccgtggttttgcaattcgtgaagcaggtggtgcatttggtaaacgtgaacaggcagaagaagaacgttattttcgtgcacagagccgtgaacagctggcagcactgaaaaaacataaagaagaagaaattgttcatcataaaaaagaaatt

SEQ ID NO: 1640 - DNA, 297 bp, Artificial Sequence
  Designed; as detailed elsewhere in present application
  CDS (1)..(297)
catcatcatcatcatcatgattataaagatgatgatgataaaggttatggtagaaaaaaaagaagacaaagaagaagaggtatggctggttctgctttggctgttagagctagatttggtgtttggggtatgaaagttttgcaaactagaggttttgctattagagaagctggtggtgcttttggtaaaagagaacaagctgaagaagaaagatattttagagctcaatctagagaacaattggctgctttgaaaaaacataaagaagaagaaattgttcatcataaaaaagaaatt

SEQ ID NO: 1641 - DNA, 297 bp, Artificial Sequence
  Designed; as detailed elsewhere in present application
  CDS (1)..(297)
caccaccaccaccaccacgactacaaggacgacgacgacaagggctacggcaggaagaagaggaggcagaggaggaggggcatggccggcagcgccctggccgtgagggccaggttcggcgtgtggggcatgaaggtgctgcagaccaggggcttcgccatcagggaggccggcggcgccttcggcaagagggagcaggccgaggaggagaggtacttcagggcccagagcagggagcagctggccgccctgaagaagcacaaggaggaggagatcgtgcaccacaagaaggagatc

SEQ ID NO: 1642 - DNA, 261 bp, Artificial Sequence
  Designed; as detailed elsewhere in present application
  CDS (1)..(261)
catcatcatcatcatcatgattataaagatgatgatgataaaggttatggtcgtaaaaaacgtcgtcagcgtcgtcgtggtatggcaggtagcgcactggcagttcgtgcacgttttggtgtttggggtatgaaagttctgcagacccgtggttttggtgcaattcgtgaagcaggtggtgcatttggtaaacgtgaacaggcagaagaagaacgttattttcgtgcacagagccgtgaacagctggcagcactgaaaaaa

SEQ ID NO: 1643 - DNA, 261 bp, Artificial Sequence
  Designed; as detailed elsewhere in present application
  CDS (1)..(261)
catcatcatcatcatcatgattataaagatgatgatgataaaggttatggtagaaaaaaaagaagacaaagaagaagaggtatggctggttctgctttggctgttagagctagatttggtgtttggggtatgaaagttttgcaaactagaggttttggtgctattagagaagctggtggtgcttttggtaaaagagaacaagctgaagaagaaagatattttagagctcaatctagagaacaattggctgctttgaaaaaa

SEQ ID NO: 1644 - DNA, 261 bp, Artificial Sequence
  Designed; as detailed elsewhere in present application
  CDS (1)..(261)
caccaccaccaccaccacgactacaaggacgacgacgacaagggctacggcaggaagaagaggaggcagaggaggaggggcatggccggcagcgccctggccgtgagggccaggttcggcgtgtggggcatgaaggtgctgcagaccaggggcttcggcgccatcagggaggccggcggcgccttcggcaagagggagcaggccgaggaggagaggtacttcagggcccagagcagggagcagctggccgccctgaagaag

SEQ ID NO: 1645 - DNA, 258 bp, Artificial Sequence
  Designed; as detailed elsewhere in present application
  CDS (1)..(258)
catcatcatcatcatcatgattataaagatgatgatgataaaggttatggtcgtaaaaaacgtcgtcagcgtcgtcgtggtatggcaggtagcgcactggcagttcgtgcacgttttggtgtttggggtatgaaagttctgcagacccgtggttttgcaattcgtgaagcaggtggtgcatttggtaaacgtgaacaggcagaagaagaacgttattttcgtgcacagagccgtgaacagctggcagcactgaaaaaa

SEQ ID NO: 1646 - DNA, 258 bp, Artificial Sequence
  Designed; as detailed elsewhere in present application
  CDS (1)..(258)
catcatcatcatcatcatgattataaagatgatgatgataaaggttatggtagaaaaaaaagaagacaaagaagaagaggtatggctggttctgctttggctgttagagctagatttggtgtttggggtatgaaagttttgcaaactagaggttttgctattagagaagctggtggtgcttttggtaaaagagaacaagctgaagaagaaagatattttagagctcaatctagagaacaattggctgctttgaaaaaa

SEQ ID NO: 1647 - DNA, 258 bp, Artificial Sequence
  Designed; as detailed elsewhere in present application
  CDS (1)..(258)
caccaccaccaccaccacgactacaaggacgacgacgacaagggctacggcaggaagaagaggaggcagaggaggaggggcatggccggcagcgccctggccgtgagggccaggttcggcgtgtggggcatgaaggtgctgcagaccaggggcttcgccatcagggaggccggcggcgccttcggcaagagggagcaggccgaggaggagaggtacttcagggcccagagcagggagcagctggccgccctgaagaag

SEQ ID NO: 1648 - DNA, 387 bp, Artificial Sequence
  Designed; as detailed elsewhere in present application
  CDS (1)..(387)
  misc_feature (45)..(45): n is a, c, g, or t
  misc_feature (48)..(48): n is a, c, g, or t
  misc_feature (51)..(51): n is a, c, g, or t
  misc_feature (54)..(54): n is a, c, g, or t
  misc_feature (57)..(57): n is a, c, g, or t
  misc_feature (60)..(60): n is a, c, g, or t
  misc_feature (63)..(63): n is a, c, g, or t
  misc_feature (66)..(66): n is a, c, g, or t
  misc_feature (72)..(72): n is a, c, g, or t
  misc_feature (75)..(75): n is a, c, g, or t
  misc_feature (78)..(78): n is a, c, g, or t
  misc_feature (81)..(81): n is a, c, g, or t
  misc_feature (84)..(84): n is a, c, g, or t
  misc_feature (87)..(87): n is a, c, g, or t
  misc_feature (90)..(90): n is a, c, g, or t
  misc_feature (93)..(93): n is a, c, g, or t
  misc_feature (96)..(96): n is a, c, g, or t
  misc_feature (102)..(102): n is a, c, g, or t
  misc_feature (105)..(105): n is a, c, g, or t
  misc_feature (108)..(108): n is a, c, g, or t
  misc_feature (114)..(114): n is a, c, g, or t
  misc_feature (117)..(117): n is a, c, g, or t
  misc_feature (120)..(120): n is a, c, g, or t
  misc_feature (123)..(123): n is a, c, g, or t
  misc_feature (132)..(132): n is a, c, g, or t
  misc_feature (135)..(135): n is a, c, g, or t
  misc_feature (138)..(138): n is a, c, g, or t
  misc_feature (144)..(144): n is a, c, g, or t
  misc_feature (147)..(147): n is a, c, g, or t
  misc_feature (153)..(153): n is a, c, g, or t
  misc_feature (156)..(156): n is a, c, g, or t
  misc_feature (165)..(165): n is a, c, g, or t
  misc_feature (168)..(168): n is a, c, g, or t
  misc_feature (171)..(171): n is a, c, g, or t
  misc_feature (174)..(174): n is a, c, g, or t
  misc_feature (177)..(177): n is a, c, g, or t
  misc_feature (180)..(180): n is a, c, g, or t
  misc_feature (183)..(183): n is a, c, g, or t
  misc_feature (189)..(189): n is a, c, g, or t
  misc_feature (195)..(195): n is a, c, g, or t
  misc_feature (198)..(198): n is a, c, g, or t
  misc_feature (201)..(201): n is a, c, g, or t
  misc_feature (204)..(204): n is a, c, g, or t
  misc_feature (210)..(210): n is a, c, g, or t
  misc_feature (225)..(225): n is a, c, g, or t
  misc_feature (237)..(237): n is a, c, g, or t
  misc_feature (246)..(246): n is a, c, g, or t
  misc_feature (249)..(249): n is a, c, g, or t
  misc_feature (252)..(252): n is a, c, g, or t
  misc_feature (255)..(255): n is a, c, g, or t
  misc_feature (267)..(267): n is a, c, g, or t
  misc_feature (270)..(270): n is a, c, g, or t
  misc_feature (273)..(273): n is a, c, g, or t
  misc_feature (276)..(276): n is a, c, g, or t
  misc_feature (303)..(303): n is a, c, g, or t
  misc_feature (312)..(312): n is a, c, g, or t
  misc_feature (330)..(330): n is a, c, g, or t
  misc_feature (348)..(348): n is a, c, g, or t
  misc_feature (360)..(360): n is a, c, g, or t
  misc_feature (372)..(372): n is a, c, g, or t
caycaycaycaycaycaygaytayaargaygaygaygayaarmgnmgnmgnmgnmgnmgnmgnggnatggcngtnacngcnytngcngcnmgnacntggytnggngtntggggngtnmgnacnatgcargcnmgnggnttyggnwsngarwsngcngayaayytnggnwsnwsngcnggngcnathmgngaygcnggnggngcnttyggnaaraargarcargcngargargarmgntayttymgngcnmgngcnaargarcarytngcngcnytnaaraarcaycaygaraaygarathwsncaycaygtnaargarathgarcayytncaraargarathgarmgncayaarcarwsnathaaraarytnaarcaygaygaygay

SEQ ID NO: 1649 - DNA, 387 bp, Artificial Sequence; identical to SEQ ID NO: 1648
  Designed; as detailed elsewhere in present application
  CDS (1)..(387)
  misc_feature (45)..(45): n is a, c, g, or t
  misc_feature (48)..(48): n is a, c, g, or t
  misc_feature (51)..(51): n is a, c, g, or t
  misc_feature (54)..(54): n is a, c, g, or t
  misc_feature (57)..(57): n is a, c, g, or t
  misc_feature (60)..(60): n is a, c, g, or t
  misc_feature (63)..(63): n is a, c, g, or t
  misc_feature (66)..(66): n is a, c, g, or t
  misc_feature (72)..(72): n is a, c, g, or t
  misc_feature (75)..(75): n is a, c, g, or t
  misc_feature (78)..(78): n is a, c, g, or t
  misc_feature (81)..(81): n is a, c, g, or t
  misc_feature (84)..(84): n is a, c, g, or t
  misc_feature (87)..(87): n is a, c, g, or t
  misc_feature (90)..(90): n is a, c, g, or t
  misc_feature (93)..(93): n is a, c, g, or t
  misc_feature (96)..(96): n is a, c, g, or t
  misc_feature (102)..(102): n is a, c, g, or t
  misc_feature (105)..(105): n is a, c, g, or t
  misc_feature (108)..(108): n is a, c, g, or t
  misc_feature (114)..(114): n is a, c, g, or t
  misc_feature (117)..(117): n is a, c, g, or t
  misc_feature (120)..(120): n is a, c, g, or t
  misc_feature (123)..(123): n is a, c, g, or t
  misc_feature (132)..(132): n is a, c, g, or t
  misc_feature (135)..(135): n is a, c, g, or t
  misc_feature (138)..(138): n is a, c, g, or t
  misc_feature (144)..(144): n is a, c, g, or t
  misc_feature (147)..(147): n is a, c, g, or t
  misc_feature (153)..(153): n is a, c, g, or t
  misc_feature (156)..(156): n is a, c, g, or t
  misc_feature (165)..(165): n is a, c, g, or t
  misc_feature (168)..(168): n is a, c, g, or t
  misc_feature (171)..(171): n is a, c, g, or t
  misc_feature (174)..(174): n is a, c, g, or t
  misc_feature (177)..(177): n is a, c, g, or t
  misc_feature (180)..(180): n is a, c, g, or t
  misc_feature (183)..(183): n is a, c, g, or t
  misc_feature (189)..(189): n is a, c, g, or t
  misc_feature (195)..(195): n is a, c, g, or t
  misc_feature (198)..(198): n is a, c, g, or t
  misc_feature (201)..(201): n is a, c, g, or t
  misc_feature (204)..(204): n is a, c, g, or t
  misc_feature (210)..(210): n is a, c, g, or t
  misc_feature (225)..(225): n is a, c, g, or t
  misc_feature (237)..(237): n is a, c, g, or t
  misc_feature (246)..(246): n is a, c, g, or t
  misc_feature (249)..(249): n is a, c, g, or t
  misc_feature (252)..(252): n is a, c, g, or t
  misc_feature (255)..(255): n is a, c, g, or t
  misc_feature (267)..(267): n is a, c, g, or t
  misc_feature (270)..(270): n is a, c, g, or t
  misc_feature (273)..(273): n is a, c, g, or t
  misc_feature (276)..(276): n is a, c, g, or t
  misc_feature (303)..(303): n is a, c, g, or t
  misc_feature (312)..(312): n is a, c, g, or t
  misc_feature (330)..(330): n is a, c, g, or t
  misc_feature (348)..(348): n is a, c, g, or t
  misc_feature (360)..(360): n is a, c, g, or t
  misc_feature (372)..(372): n is a, c, g, or t

SEQ ID NO: 1650 - DNA, 387 bp, Artificial Sequence; identical to SEQ ID NO: 1648
  Designed; as detailed elsewhere in present application
  CDS (1)..(387)
  misc_feature (45)..(45): n is a, c, g, or t
  misc_feature (48)..(48): n is a, c, g, or t
  misc_feature (51)..(51): n is a, c, g, or t
  misc_feature (54)..(54): n is a, c, g, or t
  misc_feature (57)..(57): n is a, c, g, or t
  misc_feature (60)..(60): n is a, c, g, or t
  misc_feature (63)..(63): n is a, c, g, or t
  misc_feature (66)..(66): n is a, c, g, or t
  misc_feature (72)..(72): n is a, c, g, or t
  misc_feature (75)..(75): n is a, c, g, or t
  misc_feature (78)..(78): n is a, c, g, or t
  misc_feature (81)..(81): n is a, c, g, or t
  misc_feature (84)..(84): n is a, c, g, or t
  misc_feature (87)..(87): n is a, c, g, or t
  misc_feature (90)..(90): n is a, c, g, or t
  misc_feature (93)..(93): n is a, c, g, or t
  misc_feature (96)..(96): n is a, c, g, or t
  misc_feature (102)..(102): n is a, c, g, or t
  misc_feature (105)..(105): n is a, c, g, or t
  misc_feature (108)..(108): n is a, c, g, or t
  misc_feature (114)..(114): n is a, c, g, or t
  misc_feature (117)..(117): n is a, c, g, or t
  misc_feature (120)..(120): n is a, c, g, or t
  misc_feature (123)..(123): n is a, c, g, or t
  misc_feature (132)..(132): n is a, c, g, or t
  misc_feature (135)..(135): n is a, c, g, or t
  misc_feature (138)..(138): n is a, c, g, or t
  misc_feature (144)..(144): n is a, c, g, or t
  misc_feature (147)..(147): n is a, c, g, or t
  misc_feature (153)..(153): n is a, c, g, or t
  misc_feature (156)..(156): n is a, c, g, or t
  misc_feature (165)..(165): n is a, c, g, or t
  misc_feature (168)..(168): n is a, c, g, or t
  misc_feature (171)..(171): n is a, c, g, or t
  misc_feature (174)..(174): n is a, c, g, or t
  misc_feature (177)..(177): n is a, c, g, or t
  misc_feature (180)..(180): n is a, c, g, or t
  misc_feature (183)..(183): n is a, c, g, or t
  misc_feature (189)..(189): n is a, c, g, or t
  misc_feature (195)..(195): n is a, c, g, or t
  misc_feature (198)..(198): n is a, c, g, or t
  misc_feature (201)..(201): n is a, c, g, or t
  misc_feature (204)..(204): n is a, c, g, or t
  misc_feature (210)..(210): n is a, c, g, or t
  misc_feature (225)..(225): n is a, c, g, or t
  misc_feature (237)..(237): n is a, c, g, or t
  misc_feature (246)..(246): n is a, c, g, or t
  misc_feature (249)..(249): n is a, c, g, or t
  misc_feature (252)..(252): n is a, c, g, or t
  misc_feature (255)..(255): n is a, c, g, or t
  misc_feature (267)..(267): n is a, c, g, or t
  misc_feature (270)..(270): n is a, c, g, or t
  misc_feature (273)..(273): n is a, c, g, or t
  misc_feature (276)..(276): n is a, c, g, or t
  misc_feature (303)..(303): n is a, c, g, or t
  misc_feature (312)..(312): n is a, c, g, or t
  misc_feature (330)..(330): n is a, c, g, or t
  misc_feature (348)..(348): n is a, c, g, or t
  misc_feature (360)..(360): n is a, c, g, or t
  misc_feature (372)..(372): n is a, c, g, or t

SEQ ID NO: 1651 - DNA, 387 bp, Artificial Sequence
  Designed; as detailed elsewhere in present application
  CDS (1)..(387)
  misc_feature (45)..(45): n is a, c, g, or t
  misc_feature (48)..(48): n is a, c, g, or t
  misc_feature (51)..(51): n is a, c, g, or t
  misc_feature (54)..(54): n is a, c, g, or t
  misc_feature (57)..(57): n is a, c, g, or t
  misc_feature (60)..(60): n is a, c, g, or t
  misc_feature (63)..(63): n is a, c, g, or t
  misc_feature (66)..(66): n is a, c, g, or t
  misc_feature (72)..(72): n is a, c, g, or t
  misc_feature (75)..(75): n is a, c, g, or t
  misc_feature (78)..(78): n is a, c, g, or t
  misc_feature (81)..(81): n is a, c, g, or t
  misc_feature (84)..(84): n is a, c, g, or t
  misc_feature (87)..(87): n is a, c, g, or t
  misc_feature (90)..(90): n is a, c, g, or t
  misc_feature (93)..(93): n is a, c, g, or t
  misc_feature (96)..(96): n is a, c, g, or t
  misc_feature (102)..(102): n is a, c, g, or t
  misc_feature (105)..(105): n is a, c, g, or t
  misc_feature (108)..(108): n is a, c, g, or t
  misc_feature (114)..(114): n is a, c, g, or t
  misc_feature (117)..(117): n is a, c, g, or t
  misc_feature (120)..(120): n is a, c, g, or t
  misc_feature (123)..(123): n is a, c, g, or t
  misc_feature (132)..(132): n is a, c, g, or t
  misc_feature (135)..(135): n is a, c, g, or t
  misc_feature (138)..(138): n is a, c, g, or t
  misc_feature (144)..(144): n is a, c, g, or t
  misc_feature (147)..(147): n is a, c, g, or t
  misc_feature (153)..(153): n is a, c, g, or t
  misc_feature (156)..(156): n is a, c, g, or t
  misc_feature (165)..(165): n is a, c, g, or t
  misc_feature (168)..(168): n is a, c, g, or t
  misc_feature (171)..(171): n is a, c, g, or t
  misc_feature (174)..(174): n is a, c, g, or t
  misc_feature (180)..(180): n is a, c, g, or t
  misc_feature (183)..(183): n is a, c, g, or t
  misc_feature (186)..(186): n is a, c, g, or t
  misc_feature (195)..(195): n is a, c, g, or t
  misc_feature (198)..(198): n is a, c, g, or t
  misc_feature (201)..(201): n is a, c, g, or t
  misc_feature (210)..(210): n is a, c, g, or t
  misc_feature (216)..(216): n is a, c, g, or t
  misc_feature (225)..(225): n is a, c, g, or t
  misc_feature (231)..(231): n is a, c, g, or t
  misc_feature (237)..(237): n is a, c, g, or t
  misc_feature (243)..(243): n is a, c, g, or t
  misc_feature (246)..(246): n is a, c, g, or t
  misc_feature (249)..(249): n is a, c, g, or t
  misc_feature (252)..(252): n is a, c, g, or t
  misc_feature (255)..(255): n is a, c, g, or t
  misc_feature (267)..(267): n is a, c, g, or t
  misc_feature (270)..(270): n is a, c, g, or t
  misc_feature (273)..(273): n is a, c, g, or t
  misc_feature (276)..(276): n is a, c, g, or t
  misc_feature (303)..(303): n is a, c, g, or t
  misc_feature (312)..(312): n is a, c, g, or t
  misc_feature (330)..(330): n is a, c, g, or t
  misc_feature (348)..(348): n is a, c, g, or t
  misc_feature (360)..(360): n is a, c, g, or t
  misc_feature (372)..(372): n is a, c, g, or t
caycaycaycaycaycaygaytayaargaygaygaygayaarmgnmgnmgnmgnmgnmgnmgnggnatggcngtnacngcnytngcngcnmgnacntggytnggngtntggggngtnmgnacnatgcargcnmgnggnttyggnwsngarccngcngayaayytnggnwsnwsngargcnacngtntggaaygcnggngtngayttymgnaarmgngarcargcnaarggngarmgntayytnmgngcnmgngcnaargarcarytngcngcnytnaaraarcaycaygaraaygarathwsncaycaygtnaargarathgarcayytncaraargarathgarmgncayaarcarwsnathaaraarytnaarcaygaygaygay

SEQ ID NO: 1652 - DNA, 387 bp, Artificial Sequence; identical to SEQ ID NO: 1651
  Designed; as detailed elsewhere in present application
  CDS (1)..(387)
  misc_feature (45)..(45): n is a, c, g, or t
  misc_feature (48)..(48): n is a, c, g, or t
  misc_feature (51)..(51): n is a, c, g, or t
  misc_feature (54)..(54): n is a, c, g, or t
  misc_feature (57)..(57): n is a, c, g, or t
  misc_feature (60)..(60): n is a, c, g, or t
  misc_feature (63)..(63): n is a, c, g, or t
  misc_feature (66)..(66): n is a, c, g, or t
  misc_feature (72)..(72): n is a, c, g, or t
  misc_feature (75)..(75): n is a, c, g, or t
  misc_feature (78)..(78): n is a, c, g, or t
  misc_feature (81)..(81): n is a, c, g, or t
  misc_feature (84)..(84): n is a, c, g, or t
  misc_feature (87)..(87): n is a, c, g, or t
  misc_feature (90)..(90): n is a, c, g, or t
  misc_feature (93)..(93): n is a, c, g, or t
  misc_feature (96)..(96): n is a, c, g, or t
  misc_feature (102)..(102): n is a, c, g, or t
  misc_feature (105)..(105): n is a, c, g, or t
  misc_feature (108)..(108): n is a, c, g, or t
  misc_feature (114)..(114): n is a, c, g, or t
  misc_feature (117)..(117): n is a, c, g, or t
  misc_feature (120)..(120): n is a, c, g, or t
  misc_feature (123)..(123): n is a, c, g, or t
  misc_feature (132)..(132): n is a, c, g, or t
  misc_feature (135)..(135): n is a, c, g, or t
  misc_feature (138)..(138): n is a, c, g, or t
  misc_feature (144)..(144): n is a, c, g, or t
  misc_feature (147)..(147): n is a, c, g, or t
  misc_feature (153)..(153): n is a, c, g, or t
  misc_feature (156)..(156): n is a, c, g, or t
  misc_feature (165)..(165): n is a, c, g, or t
  misc_feature (168)..(168): n is a, c, g, or t
  misc_feature (171)..(171): n is a, c, g, or t
  misc_feature (174)..(174): n is a, c, g, or t
  misc_feature (180)..(180): n is a, c, g, or t
  misc_feature (183)..(183): n is a, c, g, or t
  misc_feature (186)..(186): n is a, c, g, or t
  misc_feature (195)..(195): n is a, c, g, or t
  misc_feature (198)..(198): n is a, c, g, or t
  misc_feature (201)..(201): n is a, c, g, or t
  misc_feature (210)..(210): n is a, c, g, or t
  misc_feature (216)..(216): n is a, c, g, or t
  misc_feature (225)..(225): n is a, c, g, or t
  misc_feature (231)..(231): n is a, c, g, or t
  misc_feature (237)..(237): n is a, c, g, or t
  misc_feature (243)..(243): n is a, c, g, or t
  misc_feature (246)..(246): n is a, c, g, or t
  misc_feature (249)..(249): n is a, c, g, or t
  misc_feature (252)..(252): n is a, c, g, or t
  misc_feature (255)..(255): n is a, c, g, or t
  misc_feature (267)..(267): n is a, c, g, or t
  misc_feature (270)..(270): n is a, c, g, or t
  misc_feature (273)..(273): n is a, c, g, or t
  misc_feature (276)..(276): n is a, c, g, or t
  misc_feature (303)..(303): n is a, c, g, or t
  misc_feature (312)..(312): n is a, c, g, or t
  misc_feature (330)..(330): n is a, c, g, or t
  misc_feature (348)..(348): n is a, c, g, or t
  misc_feature (360)..(360): n is a, c, g, or t
  misc_feature (372)..(372): n is a, c, g, or t

SEQ ID NO: 1653 - DNA, 387 bp, Artificial Sequence; identical to SEQ ID NO: 1651
  Designed; as detailed elsewhere in present application
  CDS (1)..(387)
  misc_feature (45)..(45): n is a, c, g, or t
  misc_feature (48)..(48): n is a, c, g, or t
  misc_feature (51)..(51): n is a, c, g, or t
  misc_feature (54)..(54): n is a, c, g, or t
  misc_feature (57)..(57): n is a, c, g, or t
  misc_feature (60)..(60): n is a, c, g, or t
  misc_feature (63)..(63): n is a, c, g, or t
  misc_feature (66)..(66): n is a, c, g, or t
  misc_feature (72)..(72): n is a, c, g, or t
  misc_feature (75)..(75): n is a, c, g, or t
  misc_feature (78)..(78): n is a, c, g, or t
  misc_feature (81)..(81): n is a, c, g, or t
  misc_feature (84)..(84): n is a, c, g, or t
  misc_feature (87)..(87): n is a, c, g, or t
  misc_feature (90)..(90): n is a, c, g, or t
  misc_feature (93)..(93): n is a, c, g, or t
  misc_feature (96)..(96): n is a, c, g, or t
  misc_feature (102)..(102): n is a, c, g, or t
  misc_feature (105)..(105): n is a, c, g, or t
  misc_feature (108)..(108): n is a, c, g, or t
  misc_feature (114)..(114): n is a, c, g, or t
  misc_feature (117)..(117): n is a, c, g, or t
  misc_feature (120)..(120): n is a, c, g, or t
  misc_feature (123)..(123): n is a, c, g, or t
  misc_feature (132)..(132): n is a, c, g, or t
  misc_feature (135)..(135): n is a, c, g, or t
  misc_feature (138)..(138): n is a, c, g, or t
  misc_feature (144)..(144): n is a, c, g, or t
  misc_feature (147)..(147): n is a, c, g, or t
  misc_feature (153)..(153): n is a, c, g, or t
  misc_feature (156)..(156): n is a, c, g, or t
  misc_feature (165)..(165): n is a, c, g, or t
  misc_feature (168)..(168): n is a, c, g, or t
  misc_feature (171)..(171): n is a, c, g, or t
  misc_feature (174)..(174): n is a, c, g, or t
  misc_feature (180)..(180): n is a, c, g, or t
  misc_feature (183)..(183): n is a, c, g, or t
  misc_feature (186)..(186): n is a, c, g, or t
  misc_feature (195)..(195): n is a, c, g, or t
  misc_feature (198)..(198): n is a, c, g, or t
  misc_feature (201)..(201): n is a, c, g, or t
  misc_feature (210)..(210): n is a, c, g, or t
  misc_feature (216)..(216): n is a, c, g, or t
  misc_feature (225)..(225): n is a, c, g, or t
  misc_feature (231)..(231): n is a, c, g, or t
  misc_feature (237)..(237): n is a, c, g, or t
  misc_feature (243)..(243): n is a, c, g, or t
  misc_feature (246)..(246): n is a, c, g, or t
  misc_feature (249)..(249): n is a, c, g, or t
  misc_feature (252)..(252): n is a, c, g, or t
  misc_feature (255)..(255): n is a, c, g, or t
  misc_feature (267)..(267): n is a, c, g, or t
  misc_feature (270)..(270): n is a, c, g, or t
  misc_feature (273)..(273): n is a, c, g, or t
  misc_feature (276)..(276): n is a, c, g, or t
  misc_feature (303)..(303): n is a, c, g, or t
  misc_feature (312)..(312): n is a, c, g, or t
  misc_feature (330)..(330): n is a, c, g, or t
  misc_feature (348)..(348): n is a, c, g, or t
  misc_feature (360)..(360): n is a, c, g, or t
  misc_feature (372)..(372): n is a, c, g, or t

SEQ ID NO: 1654 - DNA, 384 bp, Artificial Sequence
  Designed; as detailed elsewhere in present application
  CDS (1)..(384)
  misc_feature (45)..(45): n is a, c, g, or t
  misc_feature (48)..(48): n is a, c, g, or t
  misc_feature (51)..(51): n is a, c, g, or t
  misc_feature (54)..(54): n is a, c, g, or t
  misc_feature (57)..(57): n is a, c, g, or t
  misc_feature (60)..(60): n is a, c, g, or t
  misc_feature (63)..(63): n is a, c, g, or t
  misc_feature (66)..(66): n is a, c, g, or t
  misc_feature (72)..(72): n is a, c, g, or t
  misc_feature (75)..(75): n is a, c, g, or t
  misc_feature (78)..(78): n is a, c, g, or t
  misc_feature (81)..(81): n is a, c, g, or t
  misc_feature (84)..(84): n is a, c, g, or t
  misc_feature (87)..(87): n is a, c, g, or t
  misc_feature (90)..(90): n is a, c, g, or t
  misc_feature (93)..(93): n is a, c, g, or t
  misc_feature (96)..(96): n is a, c, g, or t
  misc_feature (102)..(102): n is a, c, g, or t
  misc_feature (105)..(105): n is a, c, g, or t
  misc_feature (108)..(108): n is a, c, g, or t
  misc_feature (114)..(114): n is a, c, g, or t
  misc_feature (117)..(117): n is a, c, g, or t
  misc_feature (120)..(120): n is a, c, g, or t
  misc_feature (123)..(123): n is a, c, g, or t
  misc_feature (132)..(132): n is a, c, g, or t
  misc_feature (135)..(135): n is a, c, g, or t
  misc_feature (138)..(138): n is a, c, g, or t
  misc_feature (144)..(144): n is a, c, g, or t
  misc_feature (147)..(147): n is a, c, g, or t
  misc_feature (156)..(156): n is a, c, g, or t
  misc_feature (165)..(165): n is a, c, g, or t
  misc_feature (171)..(171): n is a, c, g, or t
  misc_feature (174)..(174): n is a, c, g, or t
  misc_feature (177)..(177): n is a, c, g, or t
  misc_feature (180)..(180): n is a, c, g, or t
  misc_feature (183)..(183): n is a, c, g, or t
  misc_feature (189)..(189): n is a, c, g, or t
  misc_feature (195)..(195): n is a, c, g, or t
  misc_feature (198)..(198): n is a, c, g, or t
  misc_feature (201)..(201): n is a, c, g, or t
  misc_feature (204)..(204): n is a, c, g, or t
  misc_feature (210)..(210): n is a, c, g, or t
  misc_feature (216)..(216): n is a, c, g, or t
  misc_feature (225)..(225): n is a, c, g, or t
  misc_feature (237)..(237): n is a, c, g, or t
  misc_feature (246)..(246): n is a, c, g, or t
  misc_feature (249)..(249): n is a, c, g, or t
  misc_feature (255)..(255): n is a, c, g, or t
  misc_feature (258)..(258): n is a, c, g, or t
  misc_feature (267)..(267): n is a, c, g, or t
  misc_feature (270)..(270): n is a, c, g, or t
  misc_feature (273)..(273): n is a, c, g, or t
  misc_feature (276)..(276): n is a, c, g, or t
  misc_feature (303)..(303): n is a, c, g, or t
  misc_feature (327)..(327): n is a, c, g, or t
  misc_feature (330)..(330): n is a, c, g, or t
  misc_feature (348)..(348): n is a, c, g, or t
  misc_feature (372)..(372): n is a, c, g, or t
caycaycaycaycaycaygaytayaargaygaygaygayaarmgnmgnmgnmgnmgnmgnmgnggnatggcngtnacngcnytngcngcnmgnacntggytnggngtntggggngtnmgnacnatgcargcnmgnggnttyggnwsngaycarwsngaraaygtngaymgnggngcnggnwsnathmgngargcnggnggngcnttyggnaarmgngarcargcngargargarmgntayttymgngcncarwsnmgngarcarytngcngcnytnaaraarcaycaygargargarathgtncaycayaaraargarathgarmgnytncaraargarathgarmgncayaarcaraarathaaratgytnaarcaygaygay

SEQ ID NO: 1655 - DNA, 384 bp, Artificial Sequence; identical to SEQ ID NO: 1654
  Designed; as detailed elsewhere in present application
  CDS (1)..(384)
  misc_feature (45)..(45): n is a, c, g, or t
  misc_feature (48)..(48): n is a, c, g, or t
  misc_feature (51)..(51): n is a, c, g, or t
  misc_feature (54)..(54): n is a, c, g, or t
  misc_feature (57)..(57): n is a, c, g, or t
  misc_feature (60)..(60): n is a, c, g, or t
  misc_feature (63)..(63): n is a, c, g, or t
  misc_feature (66)..(66): n is a, c, g, or t
  misc_feature (72)..(72): n is a, c, g, or t
  misc_feature (75)..(75): n is a, c, g, or t
  misc_feature (78)..(78): n is a, c, g, or t
  misc_feature (81)..(81): n is a, c, g, or t
  misc_feature (84)..(84): n is a, c, g, or t
  misc_feature (87)..(87): n is a, c, g, or t
  misc_feature (90)..(90): n is a, c, g, or t
  misc_feature (93)..(93): n is a, c, g, or t
  misc_feature (96)..(96): n is a, c, g, or t
  misc_feature (102)..(102): n is a, c, g, or t
  misc_feature (105)..(105): n is a, c, g, or t
  misc_feature (108)..(108): n is a, c, g, or t
  misc_feature (114)..(114): n is a, c, g, or t
  misc_feature (117)..(117): n is a, c, g, or t
  misc_feature (120)..(120): n is a, c, g, or t
  misc_feature (123)..(123): n is a, c, g, or t
  misc_feature (132)..(132): n is a, c, g, or t
  misc_feature (135)..(135): n is a, c, g, or t
  misc_feature (138)..(138): n is a, c, g, or t
  misc_feature (144)..(144): n is a, c, g, or t
  misc_feature (147)..(147): n is a, c, g, or t
  misc_feature (156)..(156): n is a, c, g, or t
  misc_feature (165)..(165): n is a, c, g, or t
  misc_feature (171)..(171): n is a, c, g, or t
  misc_feature (174)..(174): n is a, c, g, or t
  misc_feature (177)..(177): n is a, c, g, or t
  misc_feature (180)..(180): n is a, c, g, or t
  misc_feature (183)..(183): n is a, c, g, or t
  misc_feature (189)..(189): n is a, c, g, or t
  misc_feature (195)..(195): n is a, c, g, or t
  misc_feature (198)..(198): n is a, c, g, or t
  misc_feature (201)..(201): n is a, c, g, or t
  misc_feature (204)..(204): n is a, c, g, or t
  misc_feature (210)..(210): n is a, c, g, or t
  misc_feature (216)..(216): n is a, c, g, or t
  misc_feature (225)..(225): n is a, c, g, or t
  misc_feature (237)..(237): n is a, c, g, or t
  misc_feature (246)..(246): n is a, c, g, or t
  misc_feature (249)..(249): n is a, c, g, or t
  misc_feature (255)..(255): n is a, c, g, or t
  misc_feature (258)..(258): n is a, c, g, or t
  misc_feature (267)..(267): n is a, c, g, or t
  misc_feature (270)..(270): n is a, c, g, or t
  misc_feature (273)..(273): n is a, c, g, or t
  misc_feature (276)..(276): n is a, c, g, or t
  misc_feature (303)..(303): n is a, c, g, or t
  misc_feature (327)..(327): n is a, c, g, or t
  misc_feature (330)..(330): n is a, c, g, or t
  misc_feature (348)..(348): n is a, c, g, or t
  misc_feature (372)..(372): n is a, c, g, or t

SEQ ID NO: 1656 - DNA, 384 bp, Artificial Sequence; identical to SEQ ID NO: 1654
  Designed; as detailed elsewhere in present application
  CDS (1)..(384)
  misc_feature (45)..(45): n is a, c, g, or t
  misc_feature (48)..(48): n is a, c, g, or t
  misc_feature (51)..(51): n is a, c, g, or t
  misc_feature (54)..(54): n is a, c, g, or t
  misc_feature (57)..(57): n is a, c, g, or t
  misc_feature (60)..(60): n is a, c, g, or t
  misc_feature (63)..(63): n is a, c, g, or t
  misc_feature (66)..(66): n is a, c, g, or t
  misc_feature (72)..(72): n is a, c, g, or t
  misc_feature (75)..(75): n is a, c, g, or t
  misc_feature (78)..(78): n is a, c, g, or t
  misc_feature (81)..(81): n is a, c, g, or t
  misc_feature (84)..(84): n is a, c, g, or t
  misc_feature (87)..(87): n is a, c, g, or t
  misc_feature (90)..(90): n is a, c, g, or t
  misc_feature (93)..(93): n is a, c, g, or t
  misc_feature (96)..(96): n is a, c, g, or t
  misc_feature (102)..(102): n is a, c, g, or t
  misc_feature (105)..(105): n is a, c, g, or t
  misc_feature (108)..(108): n is a, c, g, or t
  misc_feature (114)..(114): n is a, c, g, or t
  misc_feature (117)..(117): n is a, c, g, or t
  misc_feature (120)..(120): n is a, c, g, or t
  misc_feature (123)..(123): n is a, c, g, or t
  misc_feature (132)..(132): n is a, c, g, or t
  misc_feature (135)..(135): n is a, c, g, or t
  misc_feature (138)..(138): n is a, c, g, or t
  misc_feature (144)..(144): n is a, c, g, or t
  misc_feature (147)..(147): n is a, c, g, or t
  misc_feature (156)..(156): n is a, c, g, or t
  misc_feature (165)..(165): n is a, c, g, or t
  misc_feature (171)..(171): n is a, c, g, or t
  misc_feature (174)..(174): n is a, c, g, or t
  misc_feature (177)..(177): n is a, c, g, or t
  misc_feature (180)..(180): n is a, c, g, or t
  misc_feature (183)..(183): n is a, c, g, or t
  misc_feature (189)..(189): n is a, c, g, or t
  misc_feature (195)..(195): n is a, c, g, or t
  misc_feature (198)..(198): n is a, c, g, or t
  misc_feature (201)..(201): n is a, c, g, or t
  misc_feature (204)..(204): n is a, c, g, or t
  misc_feature (210)..(210): n is a, c, g, or t
  misc_feature (216)..(216): n is a, c, g, or t
  misc_feature (225)..(225): n is a, c, g, or t
  misc_feature (237)..(237): n is a, c, g, or t
  misc_feature (246)..(246): n is a, c, g, or t
  misc_feature (249)..(249): n is a, c, g, or t
  misc_feature (255)..(255): n is a, c, g, or t
  misc_feature (258)..(258): n is a, c, g, or t
  misc_feature (267)..(267): n is a, c, g, or t
  misc_feature (270)..(270): n is a, c, g, or t
  misc_feature (273)..(273): n is a, c, g, or t
  misc_feature (276)..(276): n is a, c, g, or t
  misc_feature (303)..(303): n is a, c, g, or t
  misc_feature (327)..(327): n is a, c, g, or t
  misc_feature (330)..(330): n is a, c, g, or t
  misc_feature (348)..(348): n is a, c, g, or t
  misc_feature (372)..(372): n is a, c, g, or t

SEQ ID NO: 1657 - DNA, 387 bp, Artificial Sequence
  Designed; as detailed elsewhere in present application
  CDS (1)..(387)
  misc_feature (45)..(45): n is a, c, g, or t
  misc_feature (48)..(48): n is a, c, g, or t
  misc_feature (51)..(51): n is a, c, g, or t
  misc_feature (54)..(54): n is a, c, g, or t
  misc_feature (57)..(57): n is a, c, g, or t
  misc_feature (60)..(60): n is a, c, g, or t
  misc_feature (63)..(63): n is a, c, g, or t
  misc_feature (66)..(66): n is a, c, g, or t
  misc_feature (72)..(72): n is a, c, g, or t
  misc_feature (75)..(75): n is a, c, g, or t
  misc_feature (78)..(78): n is a, c, g, or t
  misc_feature (81)..(81): n is a, c, g, or t
  misc_feature (84)..(84): n is a, c, g, or t
  misc_feature (87)..(87): n is a, c, g, or t
  misc_feature (90)..(90): n is a, c, g, or t
  misc_feature (93)..(93): n is a, c, g, or t
  misc_feature (96)..(96): n is a, c, g, or t
  misc_feature (102)..(102): n is a, c, g, or t
  misc_feature (105)..(105): n is a, c, g, or t
  misc_feature (108)..(108): n is a, c, g, or t
  misc_feature (114)..(114): n is a, c, g, or t
  misc_feature (117)..(117): n is a, c, g, or t
  misc_feature (120)..(120): n is a, c, g, or t
  misc_feature (123)..(123): n is a, c, g, or t
  misc_feature (132)..(132): n is a, c, g, or t
  misc_feature (135)..(135): n is a, c, g, or t
  misc_feature (138)..(138): n is a, c, g, or t
  misc_feature (144)..(144): n is a, c, g, or t
  misc_feature (147)..(147): n is a, c, g, or t
  misc_feature (153)..(153): n is a, c, g, or t
  misc_feature (156)..(156): n is a, c, g, or t
  misc_feature (165)..(165): n is a, c, g, or t
  misc_feature (168)..(168): n is a, c, g, or t
  misc_feature (171)..(171): n is a, c, g, or t
  misc_feature (174)..(174): n is a, c, g, or t
  misc_feature (177)..(177): n is a, c, g, or t
  misc_feature (180)..(180): n is a, c, g, or t
  misc_feature (183)..(183): n is a, c, g, or t
  misc_feature (189)..(189): n is a, c, g, or t
  misc_feature (195)..(195): n is a, c, g, or t
  misc_feature (198)..(198): n is a, c, g, or t
  misc_feature (201)..(201): n is a, c, g, or t
  misc_feature (204)..(204): n is a, c, g, or t
  misc_feature (210)..(210): n is a, c, g, or t
  misc_feature (225)..(225): n is a, c, g, or t
  misc_feature (237)..(237): n is a, c, g, or t
  misc_feature (246)..(246): n is a, c, g, or t
  misc_feature (249)..(249): n is a, c, g, or t
  misc_feature (252)..(252): n is a, c, g, or t
  misc_feature (255)..(255): n is a, c, g, or t
  misc_feature (267)..(267): n is a, c, g, or t
  misc_feature (270)..(270): n is a, c, g, or t
  misc_feature (273)..(273): n is a, c, g, or t
  misc_feature (276)..(276): n is a, c, g, or t
  misc_feature (303)..(303): n is a, c, g, or t
  misc_feature (312)..(312): n is a, c, g, or t
  misc_feature (330)..(330): n is a, c, g, or t
  misc_feature (348)..(348): n is a, c, g, or t
  misc_feature (360)..(360): n is a, c, g, or t
  misc_feature (372)..(372): n is a, c, g, or t
caycaycaycaycaycaygaytayaargaygaygaygayaarmgnmgnmgnmgnmgnmgnmgnggnatggcngtnacngcnytngcngcnmgnacntggytnggngtntggggngtnmgnacnatgcargcnmgnggnttyggnwsngarwsngcngayaayytnggnwsnwsngcnggngcnathmgngaygcnggnggngcnttyggnaaraargarcargcngargargarmgntayttymgngcnmgngcnaargarcarytngcngcnytnaaraarcayaargaraaygarathwsncaycaygtnaargarathgarcayytncaraargarathgarmgncayaarcarwsnathaaraarytnaarcaygaygaygay

SEQ ID NO: 1658 - DNA, 327 bp, Artificial Sequence
  Designed; as detailed elsewhere in present application
  CDS (1)..(327)
  misc_feature (3)..(3): n is a, c, g, or t
  misc_feature (6)..(6): n is a, c, g, or t
  misc_feature (12)..(12): n is a, c, g, or t
  misc_feature (15)..(15): n is a, c, g, or t
  misc_feature (18)..(18): n is a, c, g, or t
  misc_feature (21)..(21): n is a, c, g, or t
  misc_feature (24)..(24): n is a, c, g, or t
  misc_feature (27)..(27): n is a, c, g, or t
  misc_feature (30)..(30): n is a, c, g, or t
  misc_feature (33)..(33): n is a, c, g, or t
  misc_feature (36)..(36): n is a, c, g, or t
  misc_feature (42)..(42): n is a, c, g, or t
  misc_feature (45)..(45): n is a, c, g, or t
  misc_feature (48)..(48): n is a, c, g, or t
  misc_feature (54)..(54): n is a, c, g, or t
  misc_feature (57)..(57): n is a, c, g, or t
  misc_feature (60)..(60): n is a, c, g, or t
  misc_feature (63)..(63): n is a, c, g, or t
  misc_feature (72)..(72): n is a, c, g, or t
  misc_feature (75)..(75): n is a, c, g, or t
  misc_feature (78)..(78): n is a, c, g, or t
  misc_feature (84)..(84): n is a, c, g, or t
  misc_feature (87)..(87): n is a, c, g, or t
  misc_feature (93)..(93): n is a, c, g, or t
  misc_feature (96)..(96): n is a, c, g, or t
  misc_feature (105)..(105): n is a, c, g, or t
  misc_feature (108)..(108): n is a, c, g, or t
  misc_feature (111)..(111): n is a, c, g, or t
  misc_feature (114)..(114): n is a, c, g, or t
  misc_feature (117)..(117): n is a, c, g, or t
  misc_feature (120)..(120): n is a, c, g, or t
  misc_feature (123)..(123): n is a, c, g, or t
  misc_feature (129)..(129): n is a, c, g, or t
  misc_feature (135)..(135): n is a, c, g, or t
  misc_feature (138)..(138): n is a, c, g, or t
  misc_feature (141)..(141): n is a, c, g, or t
  misc_feature (144)..(144): n is a, c, g, or t
  misc_feature (150)..(150): n is a, c, g, or t
  misc_feature (165)..(165): n is a, c, g, or t
  misc_feature (177)..(177): n is a, c, g, or t
  misc_feature (186)..(186): n is a, c, g, or t
  misc_feature (189)..(189): n is a, c, g, or t
  misc_feature (192)..(192): n is a, c, g, or t
  misc_feature (195)..(195): n is a, c, g, or t
  misc_feature (207)..(207): n is a, c, g, or t
  misc_feature (210)..(210): n is a, c, g, or t
  misc_feature (213)..(213): n is a, c, g, or t
  misc_feature (216)..(216): n is a, c, g, or t
  misc_feature (243)..(243): n is a, c, g, or t
  misc_feature (252)..(252): n is a, c, g, or t
  misc_feature (270)..(270): n is a, c, g, or t
  misc_feature (288)..(288): n is a, c, g, or t
  misc_feature (300)..(300): n is a, c, g, or t
  misc_feature (312)..(312): n is a, c, g, or t
mgnggnatggcngtnacngcnytngcngcnmgnacntggytnggngtntggggngtnmgnacnatgcargcnmgnggnttyggnwsngarwsngcngayaayytnggnwsnwsngcnggngcnathmgngaygcnggnggngcnttyggnaaraargarcargcngargargarmgntayttymgngcnmgngcnaargarcarytngcngcnytnaaraarcayaargaraaygarathwsncaycaygtnaargarathgarcayytncaraargarathgarmgncayaarcarwsnathaaraarytnaarcaygaygaygay

SEQ ID NO: 1659 - DNA, 387 bp, Artificial Sequence; identical to SEQ ID NO: 1657
  Designed; as detailed elsewhere in present application
  CDS (1)..(387)
  misc_feature (45)..(45): n is a, c, g, or t
  misc_feature (48)..(48): n is a, c, g, or t
  misc_feature (51)..(51): n is a, c, g, or t
  misc_feature (54)..(54): n is a, c, g, or t
  misc_feature (57)..(57): n is a, c, g, or t
  misc_feature (60)..(60): n is a, c, g, or t
  misc_feature (63)..(63): n is a, c, g, or t
  misc_feature (66)..(66): n is a, c, g, or t
  misc_feature (72)..(72): n is a, c, g, or t
  misc_feature (75)..(75): n is a, c, g, or t
  misc_feature (78)..(78): n is a, c, g, or t
  misc_feature (81)..(81): n is a, c, g, or t
  misc_feature (84)..(84): n is a, c, g, or t
  misc_feature (87)..(87): n is a, c, g, or t
  misc_feature (90)..(90): n is a, c, g, or t
  misc_feature (93)..(93): n is a, c, g, or t
  misc_feature (96)..(96): n is a, c, g, or t
  misc_feature (102)..(102): n is a, c, g, or t
  misc_feature (105)..(105): n is a, c, g, or t
  misc_feature (108)..(108): n is a, c, g, or t
  misc_feature (114)..(114): n is a, c, g, or t
  misc_feature (117)..(117): n is a, c, g, or t
  misc_feature (120)..(120): n is a, c, g, or t
  misc_feature (123)..(123): n is a, c, g, or t
  misc_feature (132)..(132): n is a, c, g, or t
  misc_feature (135)..(135): n is a, c, g, or t
  misc_feature (138)..(138): n is a, c, g, or t
  misc_feature (144)..(144): n is a, c, g, or t
  misc_feature (147)..(147): n is a, c, g, or t
  misc_feature (153)..(153): n is a, c, g, or t
  misc_feature (156)..(156): n is a, c, g, or t
  misc_feature (165)..(165): n is a, c, g, or t
  misc_feature (168)..(168): n is a, c, g, or t
  misc_feature (171)..(171): n is a, c, g, or t
  misc_feature (174)..(174): n is a, c, g, or t
  misc_feature (177)..(177): n is a, c, g, or t
  misc_feature (180)..(180): n is a, c, g, or t
  misc_feature (183)..(183): n is a, c, g, or t
  misc_feature (189)..(189): n is a, c, g, or t
  misc_feature (195)..(195): n is a, c, g, or t
  misc_feature (198)..(198): n is a, c, g, or t
  misc_feature (201)..(201): n is a, c, g, or t
  misc_feature (204)..(204): n is a, c, g, or t
  misc_feature (210)..(210): n is a, c, g, or t
  misc_feature (225)..(225): n is a, c, g, or t
  misc_feature (237)..(237): n is a, c, g, or t
  misc_feature (246)..(246): n is a, c, g, or t
  misc_feature (249)..(249): n is a, c, g, or t
  misc_feature (252)..(252): n is a, c, g, or t
  misc_feature (255)..(255): n is a, c, g, or t
  misc_feature (267)..(267): n is a, c, g, or t
  misc_feature (270)..(270): n is a, c, g, or t
  misc_feature (273)..(273): n is a, c, g, or t
  misc_feature (276)..(276): n is a, c, g, or t
  misc_feature (303)..(303): n is a, c, g, or t
  misc_feature (312)..(312): n is a, c, g, or t
  misc_feature (330)..(330): n is a, c, g, or t
  misc_feature (348)..(348): n is a, c, g, or t
  misc_feature (360)..(360): n is a, c, g, or t
  misc_feature (372)..(372): n is a, c, g, or t

SEQ ID NO: 1660 - DNA, 387 bp, Artificial Sequence
  Designed; as detailed elsewhere in present application
  CDS (1)..(387)
  misc_feature (45)..(45): n is a, c, g, or t
  misc_feature (48)..(48): n is a, c, g, or t
  misc_feature (51)..(51): n is a, c, g, or t
  misc_feature (54)..(54): n is a, c, g, or t
  misc_feature (57)..(57): n is a, c, g, or t
  misc_feature (60)..(60): n is a, c, g, or t
  misc_feature (63)..(63): n is a, c, g, or t
  misc_feature (66)..(66): n is a, c, g, or t
  misc_feature (72)..(72): n is a, c, g, or t
  misc_feature (75)..(75): n is a, c, g, or t
  misc_feature (78)..(78): n is a, c, g, or t
  misc_feature (81)..(81): n is a, c, g, or t
  misc_feature (84)..(84): n is a, c, g, or t
  misc_feature (87)..(87): n is a, c, g, or t
  misc_feature (90)..(90): n is a, c, g, or t
  misc_feature (93)..(93): n is a, c, g, or t
  misc_feature (96)..(96): n is a, c, g, or t
  misc_feature (102)..(102): n is a, c, g, or t
  misc_feature (105)..(105): n is a, c, g, or t
  misc_feature (108)..(108): n is a, c, g, or t
  misc_feature (114)..(114): n is a, c, g, or t
  misc_feature (117)..(117): n is a, c, g, or t
  misc_feature (120)..(120): n is a, c, g, or t
  misc_feature (123)..(123): n is a, c, g, or t
  misc_feature (132)..(132): n is a, c, g, or t
  misc_feature (135)..(135): n is a, c, g, or t
  misc_feature (138)..(138): n is a, c, g, or t
  misc_feature (144)..(144): n is a, c, g, or t
  misc_feature (147)..(147): n is a, c, g, or t
  misc_feature (153)..(153): n is a, c, g, or t
  misc_feature (156)..(156): n is a, c, g, or t
  misc_feature (165)..(165): n is a, c, g, or t
  misc_feature (168)..(168): n is a, c, g, or t
  misc_feature (171)..(171): n is a, c, g, or t
  misc_feature (174)..(174): n is a, c, g, or t
  misc_feature (180)..(180): n is a, c, g, or t
  misc_feature (183)..(183): n is a, c, g, or t
  misc_feature (186)..(186): n is a, c, g, or t
  misc_feature (195)..(195): n is a, c, g, or t
  misc_feature (198)..(198): n is a, c, g, or t
  misc_feature (201)..(201): n is a, c, g, or t
  misc_feature (210)..(210): n is a, c, g, or t
  misc_feature (216)..(216): n is a, c, g, or t
  misc_feature (225)..(225): n is a, c, g, or t
  misc_feature (231)..(231): n is a, c, g, or t
  misc_feature (237)..(237): n is a, c, g, or t
  misc_feature (243)..(243): n is a, c, g, or t
  misc_feature (246)..(246): n is a, c, g, or t
  misc_feature (249)..(249): n is a, c, g, or t
  misc_feature (252)..(252): n is a, c, g, or t
  misc_feature (255)..(255): n is a, c, g, or t
  misc_feature (267)..(267): n is a, c, g, or t
  misc_feature (270)..(270): n is a, c, g, or t
  misc_feature (273)..(273): n is a, c, g, or t
  misc_feature (276)..(276): n is a, c, g, or t
  misc_feature (303)..(303): n is a, c, g, or t
  misc_feature (312)..(312): n is a, c, g, or t
  misc_feature (330)..(330): n is a, c, g, or t
  misc_feature (348)..(348): n is a, c, g, or t
  misc_feature (360)..(360): n is a, c, g, or t
  misc_feature (372)..(372): n is a, c, g, or t
caycaycaycaycaycaygaytayaargaygaygaygayaarmgnmgnmgnmgnmgnmgnmgnggnatggcngtnacngcnytngcngcnmgnacntggytnggngtntggggngtnmgnacnatgcargcnmgnggnttyggnwsngarccngcngayaayytnggnwsnwsngargcngcngtntggaaygcnggngtngayttymgnaarmgngarcargcnaarggngarmgntayytnmgngcnmgngcnaargarcarytngcngcnytnaaraarcayaargaraaygarathwsncaycaygtnaargarathgarcayytncaraargarathgarmgncayaarcarwsnathaaraarytnaarcaygaygaygay

SEQ ID NO: 1661 - DNA, 387 bp, Artificial Sequence; identical to SEQ ID NO: 1660
  Designed; as detailed elsewhere in present application
  CDS (1)..(387)
  misc_feature (45)..(45): n is a, c, g, or t
  misc_feature (48)..(48): n is a, c, g, or t
  misc_feature (51)..(51): n is a, c, g, or t
  misc_feature (54)..(54): n is a, c, g, or t
  misc_feature (57)..(57): n is a, c, g, or t
  misc_feature (60)..(60): n is a, c, g, or t
  misc_feature (63)..(63): n is a, c, g, or t
  misc_feature (66)..(66): n is a, c, g, or t
  misc_feature (72)..(72): n is a, c, g, or t
  misc_feature (75)..(75): n is a, c, g, or t
  misc_feature (78)..(78): n is a, c, g, or t
  misc_feature (81)..(81): n is a, c, g, or t
  misc_feature (84)..(84): n is a, c, g, or t
  misc_feature (87)..(87): n is a, c, g, or t
  misc_feature (90)..(90): n is a, c, g, or t
  misc_feature (93)..(93): n is a, c, g, or t
  misc_feature (96)..(96): n is a, c, g, or t
  misc_feature (102)..(102): n is a, c, g, or t
  misc_feature (105)..(105): n is a, c, g, or t
  misc_feature (108)..(108): n is a, c, g, or t
  misc_feature (114)..(114): n is a, c, g, or t
  misc_feature (117)..(117): n is a, c, g, or t
  misc_feature (120)..(120): n is a, c, g, or t
  misc_feature (123)..(123): n is a, c, g, or t
  misc_feature (132)..(132): n is a, c, g, or t
  misc_feature (135)..(135): n is a, c, g, or t
  misc_feature (138)..(138): n is a, c, g, or t
  misc_feature (144)..(144): n is a, c, g, or t
  misc_feature (147)..(147): n is a, c, g, or t
  misc_feature (153)..(153): n is a, c, g, or t
  misc_feature (156)..(156): n is a, c, g, or t
  misc_feature (165)..(165): n is a, c, g, or t
  misc_feature (168)..(168): n is a, c, g, or t
  misc_feature (171)..(171): n is a, c, g, or t
  misc_feature (174)..(174): n is a, c, g, or t
  misc_feature (180)..(180): n is a, c, g, or t
  misc_feature (183)..(183): n is a, c, g, or t
  misc_feature (186)..(186): n is a, c, g, or t
  misc_feature (195)..(195): n is a, c, g, or t
  misc_feature (198)..(198): n is a, c, g, or t
  misc_feature (201)..(201): n is a, c, g, or t
  misc_feature (210)..(210): n is a, c, g, or t
  misc_feature (216)..(216): n is a, c, g, or t
  misc_feature (225)..(225): n is a, c, g, or t
  misc_feature (231)..(231): n is a, c, g, or t
  misc_feature (237)..(237): n is a, c, g, or t
  misc_feature (243)..(243): n is a, c, g, or t
  misc_feature (246)..(246): n is a, c, g, or t
  misc_feature (249)..(249): n is a, c, g, or t
  misc_feature (252)..(252): n is a, c, g, or t
  misc_feature (255)..(255): n is a, c, g, or t
  misc_feature (267)..(267): n is a, c, g, or t
  misc_feature (270)..(270): n is a, c, g, or t
  misc_feature (273)..(273): n is a, c, g, or t
  misc_feature (276)..(276): n is a, c, g, or t
  misc_feature (303)..(303): n is a, c, g, or t
  misc_feature (312)..(312): n is a, c, g, or t
  misc_feature (330)..(330): n is a, c, g, or t
  misc_feature (348)..(348): n is a, c, g, or t
  misc_feature (360)..(360): n is a, c, g, or t
  misc_feature (372)..(372): n is a, c, g, or t

SEQ ID NO: 1662 - DNA, 387 bp, Artificial Sequence; identical to SEQ ID NO: 1660
  Designed; as detailed elsewhere in present application
  CDS (1)..(387)
  misc_feature (45)..(45): n is a, c, g, or t
  misc_feature (48)..(48): n is a, c, g, or t
  misc_feature (51)..(51): n is a, c, g, or t
  misc_feature (54)..(54): n is a, c, g, or t
  misc_feature (57)..(57): n is a, c, g, or t
  misc_feature (60)..(60): n is a, c, g, or t
  misc_feature (63)..(63): n is a, c, g, or t
  misc_feature (66)..(66): n is a, c, g, or t
  misc_feature (72)..(72): n is a, c, g, or t
  misc_feature (75)..(75): n is a, c, g, or t
  misc_feature (78)..(78): n is a, c, g, or t
  misc_feature (81)..(81): n is a, c, g, or t
  misc_feature (84)..(84): n is a, c, g, or t
  misc_feature (87)..(87): n is a, c, g, or t
  misc_feature (90)..(90): n is a, c, g, or t
  misc_feature (93)..(93): n is a, c, g, or t
  misc_feature (96)..(96): n is a, c, g, or t
  misc_feature (102)..(102): n is a, c, g, or t
  misc_feature (105)..(105): n is a, c, g, or t
  misc_feature (108)..(108): n is a, c, g, or t
  misc_feature (114)..(114): n is a, c, g, or t
  misc_feature (117)..(117): n is a, c, g, or t
  misc_feature (120)..(120): n is a, c, g, or t
  misc_feature (123)..(123): n is a, c, g, or t
  misc_feature (132)..(132): n is a, c, g, or t
  misc_feature (135)..(135): n is a, c, g, or t
  misc_feature (138)..(138): n is a, c, g, or t
  misc_feature (144)..(144): n is a, c, g, or t
  misc_feature (147)..(147): n is a, c, g, or t
  misc_feature (153)..(153): n is a, c, g, or t
  misc_feature (156)..(156): n is a, c, g, or t
  misc_feature (165)..(165): n is a, c, g, or t
  misc_feature (168)..(168): n is a, c, g, or t
  misc_feature (171)..(171): n is a, c, g, or t
  misc_feature (174)..(174): n is a, c, g, or t
  misc_feature (180)..(180): n is a, c, g, or t
  misc_feature (183)..(183): n is a, c, g, or t
  misc_feature (186)..(186): n is a, c, g, or t
  misc_feature (195)..(195): n is a, c, g, or t
  misc_feature (198)..(198): n is a, c, g, or t
  misc_feature (201)..(201): n is a, c, g, or t
  misc_feature (210)..(210): n is a, c, g, or t
  misc_feature (216)..(216): n is a, c, g, or t
  misc_feature (225)..(225): n is a, c, g, or t
  misc_feature (231)..(231): n is a, c, g, or t
  misc_feature (237)..(237): n is a, c, g, or t
  misc_feature (243)..(243): n is a, c, g, or t
  misc_feature (246)..(246): n is a, c, g, or t
  misc_feature (249)..(249): n is a, c, g, or t
  misc_feature (252)..(252): n is a, c, g, or t
  misc_feature (255)..(255): n is a, c, g, or t
  misc_feature (267)..(267): n is a, c, g, or t
  misc_feature (270)..(270): n is a, c, g, or t
  misc_feature (273)..(273): n is a, c, g, or t
  misc_feature (276)..(276): n is a, c, g, or t
  misc_feature (303)..(303): n is a, c, g, or t
  misc_feature (312)..(312): n is a, c, g, or t
  misc_feature (330)..(330): n is a, c, g, or t
  misc_feature (348)..(348): n is a, c, g, or t
  misc_feature (360)..(360): n is a, c, g, or t
  misc_feature (372)..(372): n is a, c, g, or t

SEQ ID NO: 1663 - DNA, 384 bp, Artificial Sequence
  Designed; as detailed elsewhere in present application
  CDS (1)..(384)
  misc_feature (45)..(45): n is a, c, g, or t
  misc_feature (48)..(48): n is a, c, g, or t
  misc_feature (51)..(51): n is a, c, g, or t
  misc_feature (54)..(54): n is a, c, g, or t
  misc_feature (57)..(57): n is a, c, g, or t
  misc_feature (60)..(60): n is a, c, g, or t
  misc_feature (63)..(63): n is a, c, g, or t
  misc_feature (66)..(66): n is a, c, g, or t
  misc_feature (72)..(72): n is a, c, g, or t
  misc_feature (75)..(75): n is a, c, g, or t
  misc_feature (78)..(78): n is a, c, g, or t
  misc_feature (81)..(81): n is a, c, g, or t
  misc_feature (84)..(84): n is a, c, g, or t
  misc_feature (87)..(87): n is a, c, g, or t
  misc_feature (90)..(90): n is a, c, g, or t
  misc_feature (93)..(93): n is a, c, g, or t
  misc_feature (96)..(96): n is a, c, g, or t
  misc_feature (102)..(102): n is a, c, g, or t
  misc_feature (105)..(105): n is a, c, g, or t
  misc_feature (108)..(108): n is a, c, g, or t
  misc_feature (114)..(114): n is a, c, g, or t
  misc_feature (117)..(117): n is a, c, g, or t
  misc_feature (120)..(120): n is a, c, g, or t
  misc_feature (123)..(123): n is a, c, g, or t
  misc_feature (132)..(132): n is a, c, g, or t
  misc_feature (135)..(135): n is a, c, g, or t
  misc_feature (138)..(138): n is a, c, g, or t
  misc_feature (144)..(144): n is a, c, g, or t
  misc_feature (147)..(147): n is a, c, g, or t
  misc_feature (156)..(156): n is a, c, g, or t
  misc_feature (165)..(165): n is a, c, g, or t
  misc_feature (171)..(171): n is a, c, g, or t
  misc_feature (174)..(174): n is a, c, g, or t
  misc_feature (177)..(177): n is a, c, g, or t
  misc_feature (180)..(180): n is a, c, g, or t
  misc_feature (183)..(183): n is a, c, g, or t
  misc_feature (189)..(189): n is a, c, g, or t
  misc_feature (195)..(195): n is a, c, g, or t
  misc_feature (198)..(198): n is a, c, g, or t
  misc_feature (201)..(201): n is a, c, g, or t
  misc_feature (204)..(204): n is a, c, g, or t
  misc_feature (210)..(210): n is a, c, g, or t
  misc_feature (216)..(216): n is a, c, g, or t
  misc_feature (225)..(225): n is a, c, g, or t
  misc_feature (237)..(237): n is a, c, g, or t
  misc_feature (246)..(246): n is a, c, g, or t
  misc_feature (249)..(249): n is a, c, g, or t
  misc_feature (255)..(255): n is a, c, g, or t
  misc_feature (258)..(258): n is a, c, g, or t
  misc_feature (267)..(267): n is a, c, g, or t
  misc_feature (270)..(270): n is a, c, g, or t
  misc_feature (273)..(273): n is a, c, g, or t
  misc_feature (276)..(276): n is a, c, g, or t
  misc_feature (303)..(303): n is a, c, g, or t
  misc_feature (327)..(327): n is a, c, g, or t
  misc_feature (330)..(330): n is a, c, g, or t
  misc_feature (348)..(348): n is a, c, g, or t
  misc_feature (372)..(372): n is a, c, g, or t
caycaycaycaycaycaygaytayaargaygaygaygayaarmgnmgnmgnmgnmgnmgnmgnggnatggcngtnacngcnytngcngcnmgnacntggytnggngtntggggngtnmgnacnatgcargcnmgnggnttyggnwsngaycarwsngaraaygtngaymgnggngcnggngcnathmgngargcnggnggngcnttyggnaarmgngarcargcngargargarmgntayttymgngcncarwsnmgngarcarytngcngcnytnaaraarcayaargargargarathgtncaycayaaraargarathgarmgnytncaraargarathgarmgncayaarcaraarathaaratgytnaarcaygaygay

SEQ ID NO: 1664 - DNA, 384 bp, Artificial Sequence; identical to SEQ ID NO: 1663
  Designed; as detailed elsewhere in present application
  CDS (1)..(384)
  misc_feature (45)..(45): n is a, c, g, or t
  misc_feature (48)..(48): n is a, c, g, or t
  misc_feature (51)..(51): n is a, c, g, or t
  misc_feature (54)..(54): n is a, c, g, or t
  misc_feature (57)..(57): n is a, c, g, or t
  misc_feature (60)..(60): n is a, c, g, or t
  misc_feature (63)..(63): n is a, c, g, or t
  misc_feature (66)..(66): n is a, c, g, or t
  misc_feature (72)..(72): n is a, c, g, or t
  misc_feature (75)..(75): n is a, c, g, or t
  misc_feature (78)..(78): n is a, c, g, or t
  misc_feature (81)..(81): n is a, c, g, or t
  misc_feature (84)..(84): n is a, c, g, or t
  misc_feature (87)..(87): n is a, c, g, or t
  misc_feature (90)..(90): n is a, c, g, or t
  misc_feature (93)..(93): n is a, c, g, or t
  misc_feature (96)..(96): n is a, c, g, or t
  misc_feature (102)..(102): n is a, c, g, or t
  misc_feature (105)..(105): n is a, c, g, or t
  misc_feature (108)..(108): n is a, c, g, or t
  misc_feature (114)..(114): n is a, c, g, or t
  misc_feature (117)..(117): n is a, c, g, or t
  misc_feature (120)..(120): n is a, c, g, or t
  misc_feature (123)..(123): n is a, c, g, or t
  misc_feature (132)..(132): n is a, c, g, or t
  misc_feature (135)..(135): n is a, c, g, or t
  misc_feature (138)..(138): n is a, c, g, or t
  misc_feature (144)..(144): n is a, c, g, or t
  misc_feature (147)..(147): n is a, c, g, or t
  misc_feature (156)..(156): n is a, c, g, or t
  misc_feature (165)..(165): n is a, c, g, or t
  misc_feature (171)..(171): n is a, c, g, or t
  misc_feature (174)..(174): n is a, c, g, or t
  misc_feature (177)..(177): n is a, c, g, or t
  misc_feature (180)..(180): n is a, c, g, or t
  misc_feature (183)..(183): n is a, c, g, or t
  misc_feature (189)..(189): n is a, c, g, or t
  misc_feature (195)..(195): n is a, c, g, or t
  misc_feature (198)..(198): n is a, c, g, or t
  misc_feature (201)..(201): n is a, c, g, or t
  misc_feature (204)..(204): n is a, c, g, or t
  misc_feature (210)..(210): n is a, c, g, or t
  misc_feature (216)..(216): n is a, c, g, or t
  misc_feature (225)..(225): n is a, c, g, or t
  misc_feature (237)..(237): n is a, c, g, or t
  misc_feature (246)..(246): n is a, c, g, or t
  misc_feature (249)..(249): n is a, c, g, or t
  misc_feature (255)..(255): n is a, c, g, or t
  misc_feature (258)..(258): n is a, c, g, or t
  misc_feature (267)..(267): n is a, c, g, or t
  misc_feature (270)..(270): n is a, c, g, or t
  misc_feature (273)..(273): n is a, c, g, or t
  misc_feature (276)..(276): n is a, c, g, or t
  misc_feature (303)..(303): n is a, c, g, or t
  misc_feature (327)..(327): n is a, c, g, or t
  misc_feature (330)..(330): n is a, c, g, or t
  misc_feature (348)..(348): n is a, c, g, or t
  misc_feature (372)..(372): n is a, c, g, or t

SEQ ID NO: 1665 - DNA, 384 bp, Artificial Sequence; identical to SEQ ID NO: 1663
  Designed; as detailed elsewhere in present application
  CDS (1)..(384)
  misc_feature (45)..(45): n is a, c, g, or t
  misc_feature (48)..(48): n is a, c, g, or t
  misc_feature (51)..(51): n is a, c, g, or t
  misc_feature (54)..(54): n is a, c, g, or t
  misc_feature (57)..(57): n is a, c, g, or t
  misc_feature (60)..(60): n is a, c, g, or t
  misc_feature (63)..(63): n is a, c, g, or t
  misc_feature (66)..(66): n is a, c, g, or t
  misc_feature (72)..(72): n is a, c, g, or t
  misc_feature (75)..(75): n is a, c, g, or t
  misc_feature (78)..(78): n is a, c, g, or t
  misc_feature (81)..(81): n is a, c, g, or t
  misc_feature (84)..(84): n is a, c, g, or t
  misc_feature (87)..(87): n is a, c, g, or t
  misc_feature (90)..(90): n is a, c, g, or t
  misc_feature (93)..(93): n is a, c, g, or t
  misc_feature (96)..(96): n is a, c, g, or t
  misc_feature (102)..(102): n is a, c, g, or t
  misc_feature (105)..(105): n is a, c, g, or t
  misc_feature (108)..(108): n is a, c, g, or t
  misc_feature (114)..(114): n is a, c, g, or t
  misc_feature (117)..(117): n is a, c, g, or t
  misc_feature (120)..(120): n is a, c, g, or t
  misc_feature (123)..(123): n is a, c, g, or t
  misc_feature (132)..(132): n is a, c, g, or t
  misc_feature (135)..(135): n is a, c, g, or t
  misc_feature (138)..(138): n is a, c, g, or t
  misc_feature (144)..(144): n is a, c, g, or t
  misc_feature (147)..(147): n is a, c, g, or t
  misc_feature (156)..(156): n is a, c, g, or t
  misc_feature (165)..(165): n is a, c, g, or t
  misc_feature (171)..(171): n is a, c, g, or t
  misc_feature (174)..(174): n is a, c, g, or t
  misc_feature (177)..(177): n is a, c, g, or t
  misc_feature (180)..(180): n is a, c, g, or t
  misc_feature (183)..(183): n is a, c, g, or t
  misc_feature (189)..(189): n is a, c, g, or t
  misc_feature (195)..(195): n is a, c, g, or t
  misc_feature (198)..(198): n is a, c, g, or t
  misc_feature (201)..(201): n is a, c, g, or t
  misc_feature (204)..(204): n is a, c, g, or t
  misc_feature (210)..(210): n is a, c, g, or t
  misc_feature (216)..(216): n is a, c, g, or t
  misc_feature (225)..(225): n is a, c, g, or t
  misc_feature (237)..(237): n is a, c, g, or t
  misc_feature (246)..(246): n is a, c, g, or t
  misc_feature (249)..(249): n is a, c, g, or t
  misc_feature (255)..(255): n is a, c, g, or t
  misc_feature (258)..(258): n is a, c, g, or t
  misc_feature (267)..(267): n is a, c, g, or t
  misc_feature (270)..(270): n is a, c, g, or t
  misc_feature (273)..(273): n is a, c, g, or t
  misc_feature (276)..(276): n is a, c, g, or t
  misc_feature (303)..(303): n is a, c, g, or t
  misc_feature (327)..(327): n is a, c, g, or t
  misc_feature (330)..(330): n is a, c, g, or t
  misc_feature (348)..(348): n is a, c, g, or t
  misc_feature (372)..(372): n is a, c, g, or t

SEQ ID NO: 1666 - DNA, 402 bp, Artificial Sequence
  Designed; as detailed elsewhere in present application
  CDS (1)..(402)
  misc_feature (45)..(45): n is a, c, g, or t
  misc_feature (51)..(51): n is a, c, g, or t
  misc_feature (54)..(54): n is a, c, g, or t
  misc_feature (63)..(63): n is a, c, g, or t
  misc_feature (66)..(66): n is a, c, g, or t
  misc_feature (72)..(72): n is a, c, g, or t
  misc_feature (75)..(75): n is a, c, g, or t
  misc_feature (78)..(78): n is a, c, g, or t
  misc_feature (81)..(81): n is a, c, g, or t
  misc_feature (87)..(87): n is a, c, g, or t
  misc_feature (90)..(90): n is a, c, g, or t
  misc_feature (93)..(93): n is a, c, g, or t
  misc_feature (96)..(96): n is a, c, g, or t
  misc_feature (99)..(99): n is a, c, g, or t
  misc_feature (102)..(102): n is a, c, g, or t
  misc_feature (105)..(105): n is a, c, g, or t
  misc_feature (108)..(108): n is a, c, g, or t
  misc_feature (111)..(111): n is a, c, g, or t
  misc_feature (114)..(114): n is a, c, g, or t
  misc_feature (120)..(120): n is a, c, g, or t
  misc_feature (123)..(123): n is a, c, g, or t
  misc_feature (129)..(129): n is a, c, g, or t
  misc_feature (138)..(138): n is a, c, g, or t
  misc_feature (141)..(141): n is a, c, g, or t
  misc_feature (147)..(147): n is a, c, g, or t
  misc_feature (150)..(150): n is a, c, g, or t
  misc_feature (153)..(153): n is a, c, g, or t
  misc_feature (159)..(159): n is a, c, g, or t
  misc_feature (162)..(162): n is a, c, g, or t
  misc_feature (168)..(168): n is a, c, g, or t
  misc_feature (171)..(171): n is a, c, g, or t
  misc_feature (180)..(180): n is a, c, g, or t
  misc_feature (183)..(183): n is a, c, g, or t
  misc_feature (186)..(186): n is a, c, g, or t
  misc_feature (189)..(189): n is a, c, g, or t
  misc_feature (192)..(192): n is a, c, g, or t
  misc_feature (195)..(195): n is a, c, g, or t
  misc_feature (198)..(198): n is a, c, g, or t
  misc_feature (204)..(204): n is a, c, g, or t
  misc_feature (210)..(210): n is a, c, g, or t
  misc_feature (213)..(213): n is a, c, g, or t
  misc_feature (216)..(216): n is a, c, g, or t
  misc_feature (219)..(219): n is a, c, g, or t
  misc_feature (225)..(225): n is a, c, g, or t
  misc_feature (240)..(240): n is a, c, g, or t
  misc_feature (252)..(252): n is a, c, g, or t
  misc_feature (261)..(261): n is a, c, g, or t
  misc_feature (264)..(264): n is a, c, g, or t
  misc_feature (267)..(267): n is a, c, g, or t
  misc_feature (270)..(270): n is a, c, g, or t
  misc_feature (282)..(282): n is a, c, g, or t
  misc_feature (285)..(285): n is a, c, g, or t
  misc_feature (288)..(288): n is a, c, g, or t
  misc_feature (291)..(291): n is a, c, g, or t
  misc_feature (318)..(318): n is a, c, g, or t
  misc_feature (327)..(327): n is a, c, g, or t
  misc_feature (345)..(345): n is a, c, g, or t
  misc_feature (363)..(363): n is a, c, g, or t
  misc_feature (375)..(375): n is a, c, g, or t
  misc_feature (387)..(387): n is a, c, g, or t
caycaycaycaycaycaygaytayaargaygaygaygayaarggntayggnmgnaaraarmgnmgncarmgnmgnmgnggnatggcnggnwsngcnytngcngtnmgngcnmgnttyggngtntggggnatgaargtnytncaracnmgnggnttyggnwsngarwsngcngayaayytnggnwsnwsngcnggngcnathmgngaygcnggnggngcnttyggnaaraargarcargcngargargarmgntayttymgngcnmgngcnaargarcarytngcngcnytnaaraarcaycaygaraaygarathwsncaycaygtnaargarathgarcayytncaraargarathgarmgncayaarcarwsnathaaraarytnaarcaygaygaygay

SEQ ID NO: 1667 - DNA, 402 bp, Artificial Sequence; identical to SEQ ID NO: 1666
  Designed; as detailed elsewhere in present application
  CDS (1)..(402)
  misc_feature (45)..(45): n is a, c, g, or t
  misc_feature (51)..(51): n is a, c, g, or t
  misc_feature (54)..(54): n is a, c, g, or t
  misc_feature (63)..(63): n is a, c, g, or t
  misc_feature (66)..(66): n is a, c, g, or t
  misc_feature (72)..(72): n is a, c, g, or t
  misc_feature (75)..(75): n is a, c, g, or t
  misc_feature (78)..(78): n is a, c, g, or t
  misc_feature (81)..(81): n is a, c, g, or t
  misc_feature (87)..(87): n is a, c, g, or t
  misc_feature (90)..(90): n is a, c, g, or t
  misc_feature (93)..(93): n is a, c, g, or t
  misc_feature (96)..(96): n is a, c, g, or t
  misc_feature (99)..(99): n is a, c, g, or t
  misc_feature (102)..(102): n is a, c, g, or t
  misc_feature (105)..(105): n is a, c, g, or t
  misc_feature (108)..(108): n is a, c, g, or t
  misc_feature (111)..(111): n is a, c, g, or t
  misc_feature (114)..(114): n is a, c, g, or t
  misc_feature (120)..(120): n is a, c, g, or t
  misc_feature (123)..(123): n is a, c, g, or t
  misc_feature (129)..(129): n is a, c, g, or t
  misc_feature (138)..(138): n is a, c, g, or t
  misc_feature (141)..(141): n is a, c, g, or t
  misc_feature (147)..(147): n is a, c, g, or t
  misc_feature (150)..(150): n is a, c, g, or t
  misc_feature (153)..(153): n is a, c, g, or t
  misc_feature (159)..(159): n is a, c, g, or t
  misc_feature (162)..(162): n is a, c, g, or t
  misc_feature (168)..(168): n is a, c, g, or t
  misc_feature (171)..(171): n is a, c, g, or t
  misc_feature (180)..(180): n is a, c, g, or t
  misc_feature (183)..(183): n is a, c, g, or t
  misc_feature (186)..(186): n is a, c, g, or t
  misc_feature (189)..(189): n is a, c, g, or t
  misc_feature (192)..(192): n is a, c, g, or t
  misc_feature (195)..(195): n is a, c, g, or t
  misc_feature (198)..(198): n is a, c, g, or t
  misc_feature (204)..(204): n is a, c, g, or t
  misc_feature (210)..(210): n is a, c, g, or t
  misc_feature (213)..(213): n is a, c, g, or t
  misc_feature (216)..(216): n is a, c, g, or t
  misc_feature (219)..(219): n is a, c, g, or t
  misc_feature (225)..(225): n is a, c, g, or t
  misc_feature (240)..(240): n is a, c, g, or t
  misc_feature (252)..(252): n is a, c, g, or t
  misc_feature (261)..(261): n is a, c, g, or t
  misc_feature (264)..(264): n is a, c, g, or t
  misc_feature (267)..(267): n is a, c, g, or t
  misc_feature (270)..(270): n is a, c, g, or t
  misc_feature (282)..(282): n is a, c, g, or t
  misc_feature (285)..(285): n is a, c, g, or t
  misc_feature (288)..(288): n is a, c, g, or t
  misc_feature (291)..(291): n is a, c, g, or t
  misc_feature (318)..(318): n is a, c, g, or t
  misc_feature (327)..(327): n is a, c, g, or t
  misc_feature (345)..(345): n is a, c, g, or t
  misc_feature (363)..(363): n is a, c, g, or t
  misc_feature (375)..(375): n is a, c, g, or t
  misc_feature (387)..(387): n is a, c, g, or t

SEQ ID NO: 1668 - DNA, 402 bp, Artificial Sequence; identical to SEQ ID NO: 1666
  Designed; as detailed elsewhere in present application
  CDS (1)..(402)
  misc_feature (45)..(45): n is a, c, g, or t
  misc_feature (51)..(51): n is a, c, g, or t
  misc_feature (54)..(54): n is a, c, g, or t
  misc_feature (63)..(63): n is a, c, g, or t
  misc_feature (66)..(66): n is a, c, g, or t
  misc_feature (72)..(72): n is a, c, g, or t
  misc_feature (75)..(75): n is a, c, g, or t
  misc_feature (78)..(78): n is a, c, g, or t
  misc_feature (81)..(81): n is a, c, g, or t
  misc_feature (87)..(87): n is a, c, g, or t
  misc_feature (90)..(90): n is a, c, g, or t
  misc_feature (93)..(93): n is a, c, g, or t
  misc_feature (96)..(96): n is a, c, g, or t
  misc_feature (99)..(99): n is a, c, g, or t
  misc_feature (102)..(102): n is a, c, g, or t
  misc_feature (105)..(105): n is a, c, g, or t
  misc_feature (108)..(108): n is a, c, g, or t
  misc_feature (111)..(111): n is a, c, g, or t
  misc_feature (114)..(114): n is a, c, g, or t
  misc_feature (120)..(120): n is a, c, g, or t
  misc_feature (123)..(123): n is a, c, g, or t
  misc_feature (129)..(129): n is a, c, g, or t
  misc_feature (138)..(138): n is a, c, g, or t
  misc_feature (141)..(141): n is a, c, g, or t
  misc_feature (147)..(147): n is a, c, g, or t
  misc_feature (150)..(150): n is a, c, g, or t
  misc_feature (153)..(153): n is a, c, g, or t
  misc_feature (159)..(159): n is a, c, g, or t
  misc_feature (162)..(162): n is a, c, g, or t
  misc_feature (168)..(168): n is a, c, g, or t
  misc_feature (171)..(171): n is a, c, g, or t
  misc_feature (180)..(180): n is a, c, g, or t
  misc_feature (183)..(183): n is a, c, g, or t
  misc_feature (186)..(186): n is a, c, g, or t
  misc_feature (189)..(189): n is a, c, g, or t
  misc_feature (192)..(192): n is a, c, g, or t
  misc_feature (195)..(195): n is a, c, g, or t
  misc_feature (198)..(198): n is a, c, g, or t
  misc_feature (204)..(204): n is a, c, g, or t
  misc_feature (210)..(210): n is a, c, g, or t
  misc_feature (213)..(213): n is a, c, g, or t
  misc_feature (216)..(216): n is a, c, g, or t
  misc_feature (219)..(219): n is a, c, g, or t
  misc_feature (225)..(225): n is a, c, g, or t
  misc_feature (240)..(240): n is a, c, g, or t
  misc_feature (252)..(252): n is a, c, g, or t
  misc_feature (261)..(261): n is a, c, g, or t
  misc_feature (264)..(264): n is a, c, g, or t
  misc_feature (267)..(267): n is a, c, g, or t
  misc_feature (270)..(270): n is a, c, g, or t
  misc_feature (282)..(282): n is a, c, g, or t
  misc_feature (285)..(285): n is a, c, g, or t
  misc_feature (288)..(288): n is a, c, g, or t
  misc_feature (291)..(291): n is a, c, g, or t
  misc_feature (318)..(318): n is a, c, g, or t
  misc_feature (327)..(327): n is a, c, g, or t
  misc_feature (345)..(345): n is a, c, g, or t
  misc_feature (363)..(363): n is a, c, g, or t
  misc_feature (375)..(375): n is a, c, g, or t
  misc_feature (387)..(387): n is a, c, g, or t

SEQ ID NO: 1669 - DNA, 402 bp, Artificial Sequence
  Designed; as detailed elsewhere in present application
  CDS (1)..(402)
  misc_feature (45)..(45): n is a, c, g, or t
  misc_feature (51)..(51): n is a, c, g, or t
  misc_feature (54)..(54): n is a, c, g, or t
  misc_feature (63)..(63): n is a, c, g, or t
  misc_feature (66)..(66): n is a, c, g, or t
  misc_feature (72)..(72): n is a, c, g, or t
  misc_feature (75)..(75): n is a, c, g, or t
  misc_feature (78)..(78): n is a, c, g, or t
  misc_feature (81)..(81): n is a, c, g, or t
  misc_feature (87)..(87): n is a, c, g, or t
  misc_feature (90)..(90): n is a, c, g, or t
  misc_feature (93)..(93): n is a, c, g, or t
  misc_feature (96)..(96): n is a, c, g, or t
  misc_feature (99)..(99): n is a, c, g, or t
  misc_feature (102)..(102): n is a, c, g, or t
  misc_feature (105)..(105): n is a, c, g, or t
  misc_feature (108)..(108): n is a, c, g, or t
  misc_feature (111)..(111): n is a, c, g, or t
  misc_feature (114)..(114): n is a, c, g, or t
  misc_feature (120)..(120): n is a, c, g, or t
  misc_feature (123)..(123): n is a, c, g, or t
  misc_feature (129)..(129): n is a, c, g, or t
  misc_feature (138)..(138): n is a, c, g, or t
  misc_feature (141)..(141): n is a, c, g, or t
  misc_feature (147)..(147): n is a, c, g, or t
  misc_feature (150)..(150): n is a, c, g, or t
  misc_feature (153)..(153): n is a, c, g, or t
  misc_feature (159)..(159): n is a, c, g, or t
  misc_feature (162)..(162): n is a, c, g, or t
  misc_feature (168)..(168): n is a, c, g, or t
  misc_feature (171)..(171): n is a, c, g, or t
  misc_feature (180)..(180): n is a, c, g, or t
  misc_feature (183)..(183): n is a, c, g, or t
  misc_feature (186)..(186): n is a, c, g, or t
  misc_feature (189)..(189): n is a, c, g, or t
  misc_feature (195)..(195): n is a, c, g, or t
  misc_feature (198)..(198): n is a, c, g, or t
  misc_feature (201)..(201): n is a, c, g, or t
  misc_feature (210)..(210): n is a, c, g, or t
  misc_feature (213)..(213): n is a, c, g, or t
  misc_feature (216)..(216): n is a, c, g, or t
  misc_feature (225)..(225): n is a, c, g, or t
  misc_feature (231)..(231): n is a, c, g, or t
  misc_feature (240)..(240): n is a, c, g, or t
  misc_feature (246)..(246): n is a, c, g, or t
  misc_feature (252)..(252): n is a, c, g, or t
  misc_feature (258)..(258): n is a, c, g, or t
  misc_feature (261)..(261): n is a, c, g, or t
  misc_feature (264)..(264): n is a, c, g, or t
  misc_feature (267)..(267): n is a, c, g, or t
  misc_feature (270)..(270): n is a, c, g, or t
  misc_feature (282)..(282): n is a, c, g, or t
  misc_feature (285)..(285): n is a, c, g, or t
  misc_feature (288)..(288): n is a, c, g, or t
  misc_feature (291)..(291): n is a, c, g, or t
  misc_feature (318)..(318): n is a, c, g, or t
  misc_feature (327)..(327): n is a, c, g, or t
  misc_feature (345)..(345): n is a, c, g, or t
  misc_feature (363)..(363): n is a, c, g, or t
  misc_feature (375)..(375): n is a, c, g, or t
  misc_feature (387)..(387): n is a, c, g, or t
caycaycaycaycaycaygaytayaargaygaygaygayaarggntayggnmgnaaraarmgnmgncarmgnmgnmgnggnatggcnggnwsngcnytngcngtnmgngcnmgnttyggngtntggggnatgaargtnytncaracnmgnggnttyggnwsngarccngcngayaayytnggnwsnwsngargcnacngtntggaaygcnggngtngayttymgnaarmgngarcargcnaarggngarmgntayytnmgngcnmgngcnaargarcarytngcngcnytnaaraarcaycaygaraaygarathwsncaycaygtnaargarathgarcayytncaraargarathgarmgncayaarcarwsnathaaraarytnaarcaygaygaygay

SEQ ID NO: 1670 - DNA, 402 bp, Artificial Sequence; identical to SEQ ID NO: 1669
  Designed; as detailed elsewhere in present application
  CDS (1)..(402)
  misc_feature (45)..(45): n is a, c, g, or t
  misc_feature (51)..(51): n is a, c, g, or t
  misc_feature (54)..(54): n is a, c, g, or t
  misc_feature (63)..(63): n is a, c, g, or t
  misc_feature (66)..(66): n is a, c, g, or t
  misc_feature (72)..(72): n is a, c, g, or t
  misc_feature (75)..(75): n is a, c, g, or t
  misc_feature (78)..(78): n is a, c, g, or t
  misc_feature (81)..(81): n is a, c, g, or t
  misc_feature (87)..(87): n is a, c, g, or t
  misc_feature (90)..(90): n is a, c, g, or t
  misc_feature (93)..(93): n is a, c, g, or t
  misc_feature (96)..(96): n is a, c, g, or t
  misc_feature (99)..(99): n is a, c, g, or t
  misc_feature (102)..(102): n is a, c, g, or t
  misc_feature (105)..(105): n is a, c, g, or t
  misc_feature (108)..(108): n is a, c, g, or t
  misc_feature (111)..(111): n is a, c, g, or t
  misc_feature (114)..(114): n is a, c, g, or t
  misc_feature (120)..(120): n is a, c, g, or t
  misc_feature (123)..(123): n is a, c, g, or t
  misc_feature (129)..(129): n is a, c, g, or t
  misc_feature (138)..(138): n is a, c, g, or t
  misc_feature (141)..(141): n is a, c, g, or t
  misc_feature (147)..(147): n is a, c, g, or t
  misc_feature (150)..(150): n is a, c, g, or t
  misc_feature (153)..(153): n is a, c, g, or t
  misc_feature (159)..(159): n is a, c, g, or t
  misc_feature (162)..(162): n is a, c, g, or t
  misc_feature (168)..(168): n is a, c, g, or t
  misc_feature (171)..(171): n is a, c, g, or t
  misc_feature (180)..(180): n is a, c, g, or t
  misc_feature (183)..(183): n is a, c, g, or t
  misc_feature (186)..(186): n is a, c, g, or t
  misc_feature (189)..(189): n is a, c, g, or t
  misc_feature (195)..(195): n is a, c, g, or t
  misc_feature (198)..(198): n is a, c, g, or t
  misc_feature (201)..(201): n is a, c, g, or t
  misc_feature (210)..(210): n is a, c, g, or t
  misc_feature (213)..(213): n is a, c, g, or t
  misc_feature (216)..(216): n is a, c, g, or t
  misc_feature (225)..(225): n is a, c, g, or t
  misc_feature (231)..(231): n is a, c, g, or t
  misc_feature (240)..(240): n is a, c, g, or t
  misc_feature (246)..(246): n is a, c, g, or t
  misc_feature (252)..(252): n is a, c, g, or t
  misc_feature (258)..(258): n is a, c, g, or t
  misc_feature (261)..(261): n is a, c, g, or t
  misc_feature (264)..(264): n is a, c, g, or t
  misc_feature (267)..(267): n is a, c, g, or t
  misc_feature (270)..(270): n is a, c, g, or t
  misc_feature (282)..(282): n is a, c, g, or t
  misc_feature (285)..(285): n is a, c, g, or t
  misc_feature (288)..(288): n is a, c, g, or t
  misc_feature (291)..(291): n is a, c, g, or t
  misc_feature (318)..(318): n is a, c, g, or t
  misc_feature (327)..(327): n is a, c, g, or t
  misc_feature (345)..(345): n is a, c, g, or t
  misc_feature (363)..(363): n is a, c, g, or t
  misc_feature (375)..(375): n is a, c, g, or t
  misc_feature (387)..(387): n is a, c, g, or t

SEQ ID NO: 1671 - DNA, 402 bp, Artificial Sequence; identical to SEQ ID NO: 1669
  Designed; as detailed elsewhere in present application
  CDS (1)..(402)
  misc_feature (45)..(45): n is a, c, g, or t
  misc_feature (51)..(51): n is a, c, g, or t
  misc_feature (54)..(54): n is a, c, g, or t
  misc_feature (63)..(63): n is a, c, g, or t
  misc_feature (66)..(66): n is a, c, g, or t
  misc_feature (72)..(72): n is a, c, g, or t
  misc_feature (75)..(75): n is a, c, g, or t
  misc_feature (78)..(78): n is a, c, g, or t
  misc_feature (81)..(81): n is a, c, g, or t
  misc_feature (87)..(87): n is a, c, g, or t
  misc_feature (90)..(90): n is a, c, g, or t
  misc_feature (93)..(93): n is a, c, g, or t
  misc_feature (96)..(96): n is a, c, g, or t
  misc_feature (99)..(99): n is a, c, g, or t
  misc_feature (102)..(102): n is a, c, g, or t
  misc_feature (105)..(105): n is a, c, g, or t
  misc_feature (108)..(108): n is a, c, g, or t
  misc_feature (111)..(111): n is a, c, g, or t
  misc_feature (114)..(114): n is a, c, g, or t
  misc_feature (120)..(120): n is a, c, g, or t
  misc_feature (123)..(123): n is a, c, g, or t
  misc_feature (129)..(129): n is a, c, g, or t
  misc_feature (138)..(138): n is a, c, g, or t
  misc_feature (141)..(141): n is a, c, g, or t
  misc_feature (147)..(147): n is a, c, g, or t
  misc_feature (150)..(150): n is a, c, g, or t
  misc_feature (153)..(153): n is a, c, g, or t
  misc_feature (159)..(159): n is a, c, g, or t
  misc_feature (162)..(162): n is a, c, g, or t
  misc_feature (168)..(168): n is a, c, g, or t
  misc_feature (171)..(171): n is a, c, g, or t
  misc_feature (180)..(180): n is a, c, g, or t
  misc_feature (183)..(183): n is a, c, g, or t
  misc_feature (186)..(186): n is a, c, g, or t
  misc_feature (189)..(189): n is a, c, g, or t
  misc_feature (195)..(195): n is a, c, g, or t
  misc_feature (198)..(198): n is a, c, g, or t
  misc_feature (201)..(201): n is a, c, g, or t
  misc_feature (210)..(210): n is a, c, g, or t
  misc_feature (213)..(213): n is a, c, g, or t
  misc_feature (216)..(216): n is a, c, g, or t
  misc_feature (225)..(225): n is a, c, g, or t
  misc_feature (231)..(231): n is a, c, g, or t
  misc_feature (240)..(240): n is a, c, g, or t
  misc_feature (246)..(246): n is a, c, g, or t
  misc_feature (252)..(252): n is a, c, g, or t
  misc_feature (258)..(258): n is a, c, g, or t
  misc_feature (261)..(261): n is a, c, g, or t
  misc_feature (264)..(264): n is a, c, g, or t
  misc_feature (267)..(267): n is a, c, g, or t
  misc_feature (270)..(270): n is a, c, g, or t
  misc_feature (282)..(282): n is a, c, g, or t
  misc_feature (285)..(285): n is a, c, g, or t
  misc_feature (288)..(288): n is a, c, g, or t
  misc_feature (291)..(291): n is a, c, g, or t
  misc_feature (318)..(318): n is a, c, g, or t
  misc_feature (327)..(327): n is a, c, g, or t
  misc_feature (345)..(345): n is a, c, g, or t
  misc_feature (363)..(363): n is a, c, g, or t
  misc_feature (375)..(375): n is a, c, g, or t
  misc_feature (387)..(387): n is a, c, g, or t

SEQ ID NO: 1672 - DNA, 399 bp, Artificial Sequence
  Designed; as detailed elsewhere in present application
  CDS (1)..(399)
  misc_feature (45)..(45): n is a, c, g, or t
  misc_feature (51)..(51): n is a, c, g, or t
  misc_feature (54)..(54): n is a, c, g, or t
  misc_feature (63)..(63): n is a, c, g, or t
  misc_feature (66)..(66): n is a, c, g, or t
  misc_feature (72)..(72): n is a, c, g, or t
  misc_feature (75)..(75): n is a, c, g, or t
  misc_feature (78)..(78): n is a, c, g, or t
  misc_feature (81)..(81): n is a, c, g, or t
  misc_feature (87)..(87): n is a, c, g, or t
  misc_feature (90)..(90): n is a, c, g, or t
  misc_feature (93)..(93): n is a, c, g, or t
  misc_feature (96)..(96): n is a, c, g, or t
  misc_feature (99)..(99): n is a, c, g, or t
  misc_feature (102)..(102): n is a, c, g, or t
  misc_feature (105)..(105): n is a, c, g, or t
  misc_feature (108)..(108): n is a, c, g, or t
  misc_feature (111)..(111): n is a, c, g, or t
  misc_feature (114)..(114): n is a, c, g, or t
  misc_feature (120)..(120): n is a, c, g, or t
  misc_feature (123)..(123): n is a, c, g, or t
  misc_feature (129)..(129): n is a, c, g, or t
  misc_feature (138)..(138): n is a, c, g, or t
  misc_feature (141)..(141): n is a, c, g, or t
  misc_feature (147)..(147): n is a, c, g, or t
  misc_feature (150)..(150): n is a, c, g, or t
  misc_feature (153)..(153): n is a, c, g, or t
  misc_feature (159)..(159): n is a, c, g, or t
  misc_feature (162)..(162): n is a, c, g, or t
  misc_feature (171)..(171): n is a, c, g, or t
  misc_feature (180)..(180): n is a, c, g, or t
  misc_feature (186)..(186): n is a, c, g, or t
  misc_feature (189)..(189): n is a, c, g, or t
  misc_feature (192)..(192): n is a, c, g, or t
  misc_feature (195)..(195): n is a, c, g, or t
  misc_feature (198)..(198): n is a, c, g, or t
  misc_feature (204)..(204): n is a, c, g, or t
  misc_feature (210)..(210): n is a, c, g, or t
  misc_feature (213)..(213): n is a, c, g, or t
  misc_feature (216)..(216): n is a, c, g, or t
  misc_feature (219)..(219): n is a, c, g, or t
  misc_feature (225)..(225): n is a, c, g, or t
  misc_feature (231)..(231): n is a, c, g, or t
  misc_feature (240)..(240): n is a, c, g, or t
  misc_feature (252)..(252): n is a, c, g, or t
  misc_feature (261)..(261): n is a, c, g, or t
  misc_feature (264)..(264): n is a, c, g, or t
  misc_feature (270)..(270): n is a, c, g, or t
  misc_feature (273)..(273): n is a, c, g, or t
  misc_feature (282)..(282): n is a, c, g, or t
  misc_feature (285)..(285): n is a, c, g, or t
  misc_feature (288)..(288): n is a, c, g, or t
  misc_feature (291)..(291): n is a, c, g, or t
  misc_feature (318)..(318): n is a, c, g, or t
  misc_feature (342)..(342): n is a, c, g, or t
  misc_feature (345)..(345): n is a, c, g, or t
  misc_feature (363)..(363): n is a, c, g, or t
  misc_feature (387)..(387): n is a, c, g, or t
caycaycaycaycaycaygaytayaargaygaygaygayaarggntayggnmgnaaraarmgnmgncarmgnmgnmgnggnatggcnggnwsngcnytngcngtnmgngcnmgnttyggngtntggggnatgaargtnytncaracnmgnggnttyggnwsngaycarwsngaraaygtngaymgnggngcnggnwsnathmgngargcnggnggngcnttyggnaarmgngarcargcngargargarmgntayttymgngcncarwsnmgngarcarytngcngcnytnaaraarcaycaygargargarathgtncaycayaaraargarathgarmgnytncaraargarathgarmgncayaarcaraarathaaratgytnaarcaygaygay

SEQ ID NO: 1673 - DNA, 399 bp, Artificial Sequence; identical to SEQ ID NO: 1672
  Designed; as detailed elsewhere in present application
  CDS (1)..(399)
  misc_feature (45)..(45): n is a, c, g, or t
  misc_feature (51)..(51): n is a, c, g, or t
  misc_feature (54)..(54): n is a, c, g, or t
  misc_feature (63)..(63): n is a, c, g, or t
  misc_feature (66)..(66): n is a, c, g, or t
  misc_feature (72)..(72): n is a, c, g, or t
  misc_feature (75)..(75): n is a, c, g, or t
  misc_feature (78)..(78): n is a, c, g, or t
  misc_feature (81)..(81): n is a, c, g, or t
  misc_feature (87)..(87): n is a, c, g, or t
  misc_feature (90)..(90): n is a, c, g, or t
  misc_feature (93)..(93): n is a, c, g, or t
  misc_feature (96)..(96): n is a, c, g, or t
  misc_feature (99)..(99): n is a, c, g, or t
  misc_feature (102)..(102): n is a, c, g, or t
  misc_feature (105)..(105): n is a, c, g, or t
  misc_feature (108)..(108): n is a, c, g, or t
  misc_feature (111)..(111): n is a, c, g, or t
  misc_feature (114)..(114): n is a, c, g, or t
  misc_feature (120)..(120): n is a, c, g, or t
  misc_feature (123)..(123): n is a, c, g, or t
  misc_feature (129)..(129): n is a, c, g, or t
  misc_feature (138)..(138): n is a, c, g, or t
  misc_feature (141)..(141): n is a, c, g, or t
  misc_feature (147)..(147): n is a, c, g, or t
  misc_feature (150)..(150): n is a, c, g, or t
  misc_feature (153)..(153): n is a, c, g, or t
  misc_feature (159)..(159): n is a, c, g, or t
  misc_feature (162)..(162): n is a, c, g, or t
  misc_feature (171)..(171): n is a, c, g, or t
  misc_feature (180)..(180): n is a, c, g, or t
  misc_feature (186)..(186): n is a, c, g, or t
  misc_feature (189)..(189): n is a, c, g, or t
  misc_feature (192)..(192): n is a, c, g, or t
  misc_feature (195)..(195): n is a, c, g, or t
  misc_feature (198)..(198): n is a, c, g, or t
  misc_feature (204)..(204): n is a, c, g, or t
  misc_feature (210)..(210): n is a, c, g, or t
  misc_feature (213)..(213): n is a, c, g, or t
  misc_feature (216)..(216): n is a, c, g, or t
  misc_feature (219)..(219): n is a, c, g, or t
  misc_feature (225)..(225): n is a, c, g, or t
  misc_feature (231)..(231): n is a, c, g, or t
  misc_feature (240)..(240): n is a, c, g, or t
  misc_feature (252)..(252): n is a, c, g, or t
  misc_feature (261)..(261): n is a, c, g, or t
  misc_feature (264)..(264): n is a, c, g, or t
  misc_feature (270)..(270): n is a, c, g, or t
  misc_feature (273)..(273): n is a, c, g, or t
  misc_feature (282)..(282): n is a, c, g, or t
  misc_feature (285)..(285): n is a, c, g, or t
  misc_feature (288)..(288): n is a, c, g, or t
  misc_feature (291)..(291): n is a, c, g, or t
  misc_feature (318)..(318): n is a, c, g, or t
  misc_feature (342)..(342): n is a, c, g, or t
  misc_feature (345)..(345): n is a, c, g, or t
  misc_feature (363)..(363): n is a, c, g, or t
  misc_feature (387)..(387): n is a, c, g, or t

SEQ ID NO: 1674 - DNA, 399 bp, Artificial Sequence; identical to SEQ ID NO: 1672
  Designed; as detailed elsewhere in present application
  CDS (1)..(399)
  misc_feature (45)..(45): n is a, c, g, or t
  misc_feature (51)..(51): n is a, c, g, or t
  misc_feature (54)..(54): n is a, c, g, or t
  misc_feature (63)..(63): n is a, c, g, or t
  misc_feature (66)..(66): n is a, c, g, or t
  misc_feature (72)..(72): n is a, c, g, or t
  misc_feature (75)..(75): n is a, c, g, or t
  misc_feature (78)..(78): n is a, c, g, or t
  misc_feature (81)..(81): n is a, c, g, or t
  misc_feature (87)..(87): n is a, c, g, or t
  misc_feature (90)..(90): n is a, c, g, or t
  misc_feature (93)..(93): n is a, c, g, or t
  misc_feature (96)..(96): n is a, c, g, or t
  misc_feature (99)..(99): n is a, c, g, or t
  misc_feature (102)..(102): n is a, c, g, or t
  misc_feature (105)..(105): n is a, c, g, or t
  misc_feature (108)..(108): n is a, c, g, or t
  misc_feature (111)..(111): n is a, c, g, or t
  misc_feature (114)..(114): n is a, c, g, or t
  misc_feature (120)..(120): n is a, c, g, or t
  misc_feature (123)..(123): n is a, c, g, or t
  misc_feature (129)..(129): n is a, c, g, or t
  misc_feature (138)..(138): n is a, c, g, or t
  misc_feature (141)..(141): n is a, c, g, or t
  misc_feature (147)..(147): n is a, c, g, or t
  misc_feature (150)..(150): n is a, c, g, or t
  misc_feature (153)..(153): n is a, c, g, or t
  misc_feature (159)..(159): n is a, c, g, or t
  misc_feature (162)..(162): n is a, c, g, or t
  misc_feature (171)..(171): n is a, c, g, or t
  misc_feature (180)..(180): n is a, c, g, or t
  misc_feature (186)..(186): n is a, c, g, or t
  misc_feature (189)..(189): n is a, c, g, or t
  misc_feature (192)..(192): n is a, c, g, or t
  misc_feature (195)..(195): n is a, c, g, or t
  misc_feature (198)..(198): n is a, c, g, or t
  misc_feature (204)..(204): n is a, c, g, or t
  misc_feature (210)..(210): n is a, c, g, or t
  misc_feature (213)..(213): n is a, c, g, or t
  misc_feature (216)..(216): n is a, c, g, or t
  misc_feature (219)..(219): n is a, c, g, or t
  misc_feature (225)..(225): n is a, c, g, or t
  misc_feature (231)..(231): n is a, c, g, or t
  misc_feature (240)..(240): n is a, c, g, or t
  misc_feature (252)..(252): n is a, c, g, or t
  misc_feature (261)..(261): n is a, c, g, or t
  misc_feature (264)..(264): n is a, c, g, or t
  misc_feature (270)..(270): n is a, c, g, or t
  misc_feature (273)..(273): n is a, c, g, or t
  misc_feature (282)..(282): n is a, c, g, or t
  misc_feature (285)..(285): n is a, c, g, or t
  misc_feature (288)..(288): n is a, c, g, or t
  misc_feature (291)..(291): n is a, c, g, or t
  misc_feature (318)..(318): n is a, c, g, or t
  misc_feature (342)..(342): n is a, c, g, or t
  misc_feature (345)..(345): n is a, c, g, or t
  misc_feature (363)..(363): n is a, c, g, or t
  misc_feature (387)..(387): n is a, c, g, or t

SEQ ID NO: 1675 - DNA, 402 bp, Artificial Sequence
  Designed; as detailed elsewhere in present application
  CDS (1)..(402)
  misc_feature (45)..(45): n is a, c, g, or t
  misc_feature (51)..(51): n is a, c, g, or t
  misc_feature (54)..(54): n is a, c, g, or t
  misc_feature (63)..(63): n is a, c, g, or t
  misc_feature (66)..(66): n is a, c, g, or t
  misc_feature (72)..(72): n is a, c, g, or t
  misc_feature (75)..(75): n is a, c, g, or t
  misc_feature (78)..(78): n is a, c, g, or t
  misc_feature (81)..(81): n is a, c, g, or t
  misc_feature (87)..(87): n is a, c, g, or t
  misc_feature (90)..(90): n is a, c, g, or t
  misc_feature (93)..(93): n is a, c, g, or t
  misc_feature (96)..(96): n is a, c, g, or t
  misc_feature (99)..(99): n is a, c, g, or t
  misc_feature (102)..(102): n is a, c, g, or t
  misc_feature (105)..(105): n is a, c, g, or t
  misc_feature (108)..(108): n is a, c, g, or t
  misc_feature (111)..(111): n is a, c, g, or t
  misc_feature (114)..(114): n is a, c, g, or t
  misc_feature (120)..(120): n is a, c, g, or t
  misc_feature (123)..(123): n is a, c, g, or t
  misc_feature (129)..(129): n is a, c, g, or t
  misc_feature (138)..(138): n is a, c, g, or t
  misc_feature (141)..(141): n is a, c, g, or t
  misc_feature (147)..(147): n is a, c, g, or t
  misc_feature (150)..(150): n is a, c, g, or t
  misc_feature (153)..(153): n is a, c, g, or t
  misc_feature (159)..(159): n is a, c, g, or t
  misc_feature (162)..(162): n is a, c, g, or t
  misc_feature (168)..(168): n is a, c, g, or t
  misc_feature (171)..(171): n is a, c, g, or t
  misc_feature (180)..(180): n is a, c, g, or t
  misc_feature (183)..(183): n is a, c, g, or t
  misc_feature (186)..(186): n is a, c, g, or t
  misc_feature (189)..(189): n is a, c, g, or t
  misc_feature (192)..(192): n is a, c, g, or t
  misc_feature (195)..(195): n is a, c, g, or t
  misc_feature (198)..(198): n is a, c, g, or t
  misc_feature (204)..(204): n is a, c, g, or t
  misc_feature (210)..(210): n is a, c, g, or t
  misc_feature (213)..(213): n is a, c, g, or t
  misc_feature (216)..(216): n is a, c, g, or t
  misc_feature (219)..(219): n is a, c, g, or t
  misc_feature (225)..(225): n is a, c, g, or t
  misc_feature (240)..(240): n is a, c, g, or t
  misc_feature (252)..(252): n is a, c, g, or t
  misc_feature (261)..(261): n is a, c, g, or t
  misc_feature (264)..(264): n is a, c, g, or t
  misc_feature (267)..(267): n is a, c, g, or t
  misc_feature (270)..(270): n is a, c, g, or t
  misc_feature (282)..(282): n is a, c, g, or t
  misc_feature (285)..(285): n is a, c, g, or t
  misc_feature (288)..(288): n is a, c, g, or t
  misc_feature (291)..(291): n is a, c, g, or t
  misc_feature (318)..(318): n is a, c, g, or t
  misc_feature (327)..(327): n is a, c, g, or t
  misc_feature (345)..(345): n is a, c, g, or t
  misc_feature (363)..(363): n is a, c, g, or t
  misc_feature (375)..(375): n is a, c, g, or t
  misc_feature (387)..(387): n is a, c, g, or t
caycaycaycaycaycaygaytayaargaygaygaygayaarggntayggnmgnaaraarmgnmgncarmgnmgnmgnggnatggcnggnwsngcnytngcngtnmgngcnmgnttyggngtntggggnatgaargtnytncaracnmgnggnttyggnwsngarwsngcngayaayytnggnwsnwsngcnggngcnathmgngaygcnggnggngcnttyggnaaraargarcargcngargargarmgntayttymgngcnmgngcnaargarcarytngcngcnytnaaraarcayaargaraaygarathwsncaycaygtnaargarathgarcayytncaraargarathgarmgncayaarcarwsnathaaraarytnaarcaygaygaygay

SEQ ID NO: 1676 - DNA, 402 bp, Artificial Sequence; identical to SEQ ID NO: 1675
  Designed; as detailed elsewhere in present application
  CDS (1)..(402)
  misc_feature (45)..(45): n is a, c, g, or t
  misc_feature (51)..(51): n is a, c, g, or t
  misc_feature (54)..(54): n is a, c, g, or t
  misc_feature (63)..(63): n is a, c, g, or t
  misc_feature (66)..(66): n is a, c, g, or t
  misc_feature (72)..(72): n is a, c, g, or t
  misc_feature (75)..(75): n is a, c, g, or t
  misc_feature (78)..(78): n is a, c, g, or t
  misc_feature (81)..(81): n is a, c, g, or t
  misc_feature (87)..(87): n is a, c, g, or t
  misc_feature (90)..(90): n is a, c, g, or t
  misc_feature (93)..(93): n is a, c, g, or t
  misc_feature (96)..(96): n is a, c, g, or t
  misc_feature (99)..(99): n is a, c, g, or t
  misc_feature (102)..(102): n is a, c, g, or t
  misc_feature (105)..(105): n is a, c, g, or t
  misc_feature (108)..(108): n is a, c, g, or t
  misc_feature (111)..(111): n is a, c, g, or t
  misc_feature (114)..(114): n is a, c, g, or t
  misc_feature (120)..(120): n is a, c, g, or t
  misc_feature (123)..(123): n is a, c, g, or t
  misc_feature (129)..(129): n is a, c, g, or t
  misc_feature (138)..(138): n is a, c, g, or t
  misc_feature (141)..(141): n is a, c, g, or t
  misc_feature (147)..(147): n is a, c, g, or t
  misc_feature (150)..(150): n is a, c, g, or t
  misc_feature (153)..(153): n is a, c, g, or t
  misc_feature (159)..(159): n is a, c, g, or t
  misc_feature (162)..(162): n is a, c, g, or t
  misc_feature (168)..(168): n is a, c, g, or t
  misc_feature (171)..(171): n is a, c, g, or t
  misc_feature (180)..(180): n is a, c, g, or t
  misc_feature (183)..(183): n is a, c, g, or t
  misc_feature (186)..(186): n is a, c, g, or t
  misc_feature (189)..(189): n is a, c, g, or t
  misc_feature (192)..(192): n is a, c, g, or t
  misc_feature (195)..(195): n is a, c, g, or t
  misc_feature (198)..(198): n is a, c, g, or t
  misc_feature (204)..(204): n is a, c, g, or t
  misc_feature (210)..(210): n is a, c, g, or t
  misc_feature (213)..(213): n is a, c, g, or t
  misc_feature (216)..(216): n is a, c, g, or t
  misc_feature (219)..(219): n is a, c, g, or t
  misc_feature (225)..(225): n is a, c, g, or t
  misc_feature (240)..(240): n is a, c, g, or t
  misc_feature (252)..(252): n is a, c, g, or t
  misc_feature (261)..(261): n is a, c, g, or t
  misc_feature (264)..(264): n is a, c, g, or t
  misc_feature (267)..(267): n is a, c, g, or t
  misc_feature (270)..(270): n is a, c, g, or t
  misc_feature (282)..(282): n is a, c, g, or t
  misc_feature (285)..(285): n is a, c, g, or t
  misc_feature (288)..(288): n is a, c, g, or t
  misc_feature (291)..(291): n is a, c, g, or t
  misc_feature (318)..(318): n is a, c, g, or t
  misc_feature (327)..(327): n is a, c, g, or t
  misc_feature (345)..(345): n is a, c, g, or t
  misc_feature (363)..(363): n is a, c, g, or t
  misc_feature (375)..(375): n is a, c, g, or t
  misc_feature (387)..(387): n is a, c, g, or t

SEQ ID NO: 1677 - DNA, 402 bp, Artificial Sequence; identical to SEQ ID NO: 1675
  Designed; as detailed elsewhere in present application
  CDS (1)..(402)
  misc_feature (45)..(45): n is a, c, g, or t
  misc_feature (51)..(51): n is a, c, g, or t
  misc_feature (54)..(54): n is a, c, g, or t
  misc_feature (63)..(63): n is a, c, g, or t
  misc_feature (66)..(66): n is a, c, g, or t
  misc_feature (72)..(72): n is a, c, g, or t
  misc_feature (75)..(75): n is a, c, g, or t
  misc_feature (78)..(78): n is a, c, g, or t
  misc_feature (81)..(81): n is a, c, g, or t
  misc_feature (87)..(87): n is a, c, g, or t
  misc_feature (90)..(90): n is a, c, g, or t
  misc_feature (93)..(93): n is a, c, g, or t
  misc_feature (96)..(96): n is a, c, g, or t
  misc_feature (99)..(99): n is a, c, g, or t
  misc_feature (102)..(102): n is a, c, g, or t
  misc_feature (105)..(105): n is a, c, g, or t
  misc_feature (108)..(108): n is a, c, g, or t
  misc_feature (111)..(111): n is a, c, g, or t
  misc_feature (114)..(114): n is a, c, g, or t
  misc_feature (120)..(120): n is a, c, g, or t
  misc_feature (123)..(123): n is a, c, g, or t
  misc_feature (129)..(129): n is a, c, g, or t
  misc_feature (138)..(138): n is a, c, g, or t
  misc_feature (141)..(141): n is a, c, g, or t
  misc_feature (147)..(147): n is a, c, g, or t
  misc_feature (150)..(150): n is a, c, g, or t
  misc_feature (153)..(153): n is a, c, g, or t
  misc_feature (159)..(159): n is a, c, g, or t
  misc_feature (162)..(162): n is a, c, g, or t
  misc_feature (168)..(168): n is a, c, g, or t
  misc_feature (171)..(171): n is a, c, g, or t
  misc_feature (180)..(180): n is a, c, g, or t
  misc_feature (183)..(183): n is a, c, g, or t
  misc_feature (186)..(186): n is a, c, g, or t
  misc_feature (189)..(189): n is a, c, g, or t
  misc_feature (192)..(192): n is a, c, g, or t
  misc_feature (195)..(195): n is a, c, g, or t
  misc_feature (198)..(198): n is a, c, g, or t
  misc_feature (204)..(204): n is a, c, g, or t
  misc_feature (210)..(210): n is a, c, g, or t
  misc_feature (213)..(213): n is a, c, g, or t
  misc_feature (216)..(216): n is a, c, g, or t
  misc_feature (219)..(219): n is a, c, g, or t
  misc_feature (225)..(225): n is a, c, g, or t
  misc_feature (240)..(240): n is a, c, g, or t
  misc_feature (252)..(252): n is a, c, g, or t
  misc_feature (261)..(261): n is a, c, g, or t
  misc_feature (264)..(264): n is a, c, g, or t
  misc_feature (267)..(267): n is a, c, g, or t
  misc_feature (270)..(270): n is a, c, g, or t
  misc_feature (282)..(282): n is a, c, g, or t
  misc_feature (285)..(285): n is a, c, g, or t
  misc_feature (288)..(288): n is a, c, g, or t
  misc_feature (291)..(291): n is a, c, g, or t
  misc_feature (318)..(318): n is a, c, g, or t
  misc_feature (327)..(327): n is a, c, g, or t
  misc_feature (345)..(345): n is a, c, g, or t
  misc_feature (363)..(363): n is a, c, g, or t
  misc_feature (375)..(375): n is a, c, g, or t
  misc_feature (387)..(387): n is a, c, g, or t

SEQ ID NO: 1678 - DNA, 402 bp, Artificial Sequence
  Designed; as detailed elsewhere in present application
  CDS (1)..(402)
  misc_feature (45)..(45): n is a, c, g, or t
  misc_feature (51)..(51): n is a, c, g, or t
  misc_feature (54)..(54): n is a, c, g, or t
  misc_feature (63)..(63): n is a, c, g, or t
  misc_feature (66)..(66): n is a, c, g, or t
  misc_feature (72)..(72): n is a, c, g, or t
  misc_feature (75)..(75): n is a, c, g, or t
  misc_feature (78)..(78): n is a, c, g, or t
  misc_feature (81)..(81): n is a, c, g, or t
  misc_feature (87)..(87): n is a, c, g, or t
  misc_feature (90)..(90): n is a, c, g, or t
  misc_feature (93)..(93): n is a, c, g, or t
  misc_feature (96)..(96): n is a, c, g, or t
  misc_feature (99)..(99): n is a, c, g, or t
  misc_feature (102)..(102): n is a, c, g, or t
  misc_feature (105)..(105): n is a, c, g, or t
  misc_feature (108)..(108): n is a, c, g, or t
  misc_feature (111)..(111): n is a, c, g, or t
  misc_feature (114)..(114): n is a, c, g, or t
  misc_feature (120)..(120): n is a, c, g, or t
  misc_feature (123)..(123): n is a, c, g, or t
  misc_feature (129)..(129): n is a, c, g, or t
  misc_feature (138)..(138): n is a, c, g, or t
  misc_feature (141)..(141): n is a, c, g, or t
  misc_feature (147)..(147): n is a, c, g, or t
  misc_feature (150)..(150): n is a, c, g, or t
  misc_feature (153)..(153): n is a, c, g, or t
  misc_feature (159)..(159): n is a, c, g, or t
  misc_feature (162)..(162): n is a, c, g, or t
  misc_feature (168)..(168): n is a, c, g, or t
  misc_feature (171)..(171): n is a, c, g, or t
  misc_feature (180)..(180): n is a, c, g, or t
  misc_feature (183)..(183): n is a, c, g, or t
  misc_feature (186)..(186): n is a, c, g, or t
  misc_feature (189)..(189): n is a, c, g, or t
  misc_feature (195)..(195): n is a, c, g, or t
  misc_feature (198)..(198): n is a, c, g, or t
  misc_feature (201)..(201): n is a, c, g, or t
  misc_feature (210)..(210): n is a, c, g, or t
  misc_feature (213)..(213): n is a, c, g, or t
  misc_feature (216)..(216): n is a, c, g, or t
  misc_feature (225)..(225): n is a, c, g, or t
  misc_feature (231)..(231): n is a, c, g, or t
  misc_feature (240)..(240): n is a, c, g, or t
  misc_feature (246)..(246): n is a, c, g, or t
  misc_feature (252)..(252): n is a, c, g, or t
  misc_feature (258)..(258): n is a, c, g, or t
  misc_feature (261)..(261): n is a, c, g, or t
  misc_feature (264)..(264): n is a, c, g, or t
  misc_feature (267)..(267): n is a, c, g, or t
  misc_feature (270)..(270): n is a, c, g, or t
  misc_feature (282)..(282): n is a, c, g, or t
  misc_feature (285)..(285): n is a, c, g, or t
  misc_feature (288)..(288): n is a, c, g, or t
  misc_feature (291)..(291): n is a, c, g, or t
  misc_feature (318)..(318): n is a, c, g, or t
  misc_feature (327)..(327): n is a, c, g, or t
  misc_feature (345)..(345): n is a, c, g, or t
  misc_feature (363)..(363): n is a, c, g, or t
  misc_feature (375)..(375): n is a, c, g, or t
  misc_feature (387)..(387): n is a, c, g, or t
caycaycaycaycaycaygaytayaargaygaygaygayaarggntayggnmgnaaraarmgnmgncarmgnmgnmgnggnatggcnggnwsngcnytngcngtnmgngcnmgnttyggngtntggggnatgaargtnytncaracnmgnggnttyggnwsngarccngcngayaayytnggnwsnwsngargcngcngtntggaaygcnggngtngayttymgnaarmgngarcargcnaarggngarmgntayytnmgngcnmgngcnaargarcarytngcngcnytnaaraarcayaargaraaygarathwsncaycaygtnaargarathgarcayytncaraargarathgarmgncayaarcarwsnathaaraarytnaarcaygaygaygay

SEQ ID NO: 1679 - DNA, 402 bp, Artificial Sequence; identical to SEQ ID NO: 1678
  Designed; as detailed elsewhere in present application
  CDS (1)..(402)
  misc_feature (45)..(45): n is a, c, g, or t
  misc_feature (51)..(51): n is a, c, g, or t
  misc_feature (54)..(54): n is a, c, g, or t
  misc_feature (63)..(63): n is a, c, g, or t
  misc_feature (66)..(66): n is a, c, g, or t
  misc_feature (72)..(72): n is a, c, g, or t
  misc_feature (75)..(75): n is a, c, g, or t
  misc_feature (78)..(78): n is a, c, g, or t
  misc_feature (81)..(81): n is a, c, g, or t
  misc_feature (87)..(87): n is a, c, g, or t
  misc_feature (90)..(90): n is a, c, g, or t
  misc_feature (93)..(93): n is a, c, g, or t
  misc_feature (96)..(96): n is a, c, g, or t
  misc_feature (99)..(99): n is a, c, g, or t
  misc_feature (102)..(102): n is a, c, g, or t
  misc_feature (105)..(105): n is a, c, g, or t
  misc_feature (108)..(108): n is a, c, g, or t
  misc_feature (111)..(111): n is a, c, g, or t
  misc_feature (114)..(114): n is a, c, g, or t
  misc_feature (120)..(120): n is a, c, g, or t
  misc_feature (123)..(123): n is a, c, g, or t
  misc_feature (129)..(129): n is a, c, g, or t
  misc_feature (138)..(138): n is a, c, g, or t
  misc_feature (141)..(141): n is a, c, g, or t
  misc_feature (147)..(147): n is a, c, g, or t
  misc_feature (150)..(150): n is a, c, g, or t
  misc_feature (153)..(153): n is a, c, g, or t
  misc_feature (159)..(159): n is a, c, g, or t
  misc_feature (162)..(162): n is a, c, g, or t
  misc_feature (168)..(168): n is a, c, g, or t
  misc_feature (171)..(171): n is a, c, g, or t
  misc_feature (180)..(180): n is a, c, g, or t
  misc_feature (183)..(183): n is a, c, g, or t
  misc_feature (186)..(186): n is a, c, g, or t
  misc_feature (189)..(189): n is a, c, g, or t
  misc_feature (195)..(195): n is a, c, g, or t
  misc_feature (198)..(198): n is a, c, g, or t
  misc_feature (201)..(201): n is a, c, g, or t
  misc_feature (210)..(210): n is a, c, g, or t
  misc_feature (213)..(213): n is a, c, g, or t
  misc_feature (216)..(216): n is a, c, g, or t
  misc_feature (225)..(225): n is a, c, g, or t
  misc_feature (231)..(231): n is a, c, g, or t
  misc_feature (240)..(240): n is a, c, g, or t
  misc_feature (246)..(246): n is a, c, g, or t
  misc_feature (252)..(252): n is a, c, g, or t
  misc_feature (258)..(258): n is a, c, g, or t
  misc_feature (261)..(261): n is a, c, g, or t
  misc_feature (264)..(264): n is a, c, g, or t
  misc_feature (267)..(267): n is a, c, g, or t
  misc_feature (270)..(270): n is a, c, g, or t
  misc_feature (282)..(282): n is a, c, g, or t
  misc_feature (285)..(285): n is a, c, g, or t
  misc_feature (288)..(288): n is a, c, g, or t
  misc_feature (291)..(291): n is a, c, g, or t
  misc_feature (318)..(318): n is a, c, g, or t
  misc_feature (327)..(327): n is a, c, g, or t
  misc_feature (345)..(345): n is a, c, g, or t
  misc_feature (363)..(363): n is a, c, g, or t
  misc_feature (375)..(375): n is a, c, g, or t
  misc_feature (387)..(387): n is a, c, g, or t

SEQ ID NO: 1680 - DNA, 402 bp, Artificial Sequence; identical to SEQ ID NO: 1678
  Designed; as detailed elsewhere in present application
  CDS (1)..(402)
  misc_feature (45)..(45): n is a, c, g, or t
  misc_feature (51)..(51): n is a, c, g, or t
  misc_feature (54)..(54): n is a, c, g, or t
  misc_feature (63)..(63): n is a, c, g, or t
  misc_feature (66)..(66): n is a, c, g, or t
  misc_feature (72)..(72): n is a, c, g, or t
  misc_feature (75)..(75): n is a, c, g, or t
  misc_feature (78)..(78): n is a, c, g, or t
  misc_feature (81)..(81): n is a, c, g, or t
  misc_feature (87)..(87): n is a, c, g, or t
  misc_feature (90)..(90): n is a, c, g, or t
  misc_feature (93)..(93): n is a, c, g, or t
  misc_feature (96)..(96): n is a, c, g, or t
  misc_feature (99)..(99): n is a, c, g, or t
  misc_feature (102)..(102): n is a, c, g, or t
  misc_feature (105)..(105): n is a, c, g, or t
  misc_feature (108)..(108): n is a, c, g, or t
  misc_feature (111)..(111): n is a, c, g, or t
  misc_feature (114)..(114): n is a, c, g, or t
  misc_feature (120)..(120): n is a, c, g, or t
  misc_feature (123)..(123): n is a, c, g, or t
  misc_feature (129)..(129): n is a, c, g, or t
  misc_feature (138)..(138): n is a, c, g, or t
  misc_feature (141)..(141): n is a, c, g, or t
  misc_feature (147)..(147): n is a, c, g, or t
  misc_feature (150)..(150): n is a, c, g, or t
  misc_feature (153)..(153): n is a, c, g, or t
  misc_feature (159)..(159): n is a, c, g, or t
  misc_feature (162)..(162): n is a, c, g, or t
  misc_feature (168)..(168): n is a, c, g, or t
  misc_feature (171)..(171): n is a, c, g, or t
  misc_feature (180)..(180): n is a, c, g, or t
  misc_feature (183)..(183): n is a, c, g, or t
  misc_feature (186)..(186): n is a, c, g, or t
  misc_feature (189)..(189): n is a, c, g, or t
  misc_feature (195)..(195): n is a, c, g, or t
  misc_feature (198)..(198): n is a, c, g, or t
  misc_feature (201)..(201): n is a, c, g, or t
  misc_feature (210)..(210): n is a, c, g, or t
  misc_feature (213)..(213): n is a, c, g, or t
  misc_feature (216)..(216): n is a, c, g, or t
  misc_feature (225)..(225): n is a, c, g, or t
  misc_feature (231)..(231): n is a, c, g, or t
  misc_feature (240)..(240): n is a, c, g, or t
  misc_feature (246)..(246): n is a, c, g, or t
  misc_feature (252)..(252): n is a, c, g, or t
  misc_feature (258)..(258): n is a, c, g, or t
  misc_feature (261)..(261): n is a, c, g, or t
  misc_feature (264)..(264): n is a, c, g, or t
  misc_feature (267)..(267): n is a, c, g, or t
  misc_feature (270)..(270): n is a, c, g, or t
  misc_feature (282)..(282): n is a, c, g, or t
  misc_feature (285)..(285): n is a, c, g, or t
  misc_feature (288)..(288): n is a, c, g, or t
  misc_feature (291)..(291): n is a, c, g, or t
  misc_feature (318)..(318): n is a, c, g, or t
  misc_feature (327)..(327): n is a, c, g, or t
  misc_feature (345)..(345): n is a, c, g, or t
  misc_feature (363)..(363): n is a, c, g, or t
  misc_feature (375)..(375): n is a, c, g, or t
  misc_feature (387)..(387): n is a, c, g, or t

SEQ ID NO: 1681 - DNA, 399 bp, Artificial Sequence
  Designed; as detailed elsewhere in present application
  CDS (1)..(399)
  misc_feature (45)..(45): n is a, c, g, or t
  misc_feature (51)..(51): n is a, c, g, or t
  misc_feature (54)..(54): n is a, c, g, or t
  misc_feature (63)..(63): n is a, c, g, or t
  misc_feature (66)..(66): n is a, c, g, or t
  misc_feature (72)..(72): n is a, c, g, or t
  misc_feature (75)..(75): n is a, c, g, or t
  misc_feature (78)..(78): n is a, c, g, or t
  misc_feature (81)..(81): n is a, c, g, or t
  misc_feature (87)..(87): n is a, c, g, or t
  misc_feature (90)..(90): n is a, c, g, or t
  misc_feature (93)..(93): n is a, c, g, or t
  misc_feature (96)..(96): n is a, c, g, or t
  misc_feature (99)..(99): n is a, c, g, or t
  misc_feature (102)..(102): n is a, c, g, or t
  misc_feature (105)..(105): n is a, c, g, or t
  misc_feature (108)..(108): n is a, c, g, or t
  misc_feature (111)..(111): n is a, c, g, or t
  misc_feature (114)..(114): n is a, c, g, or t
  misc_feature (120)..(120): n is a, c, g, or t
  misc_feature (123)..(123): n is a, c, g, or t
  misc_feature (129)..(129): n is a, c, g, or t
  misc_feature (138)..(138): n is a, c, g, or t
  misc_feature (141)..(141): n is a, c, g, or t
  misc_feature (147)..(147): n is a, c, g, or t
  misc_feature (150)..(150): n is a, c, g, or t
  misc_feature (153)..(153): n is a, c, g, or t
  misc_feature (159)..(159): n is a, c, g, or t
  misc_feature (162)..(162): n is a, c, g, or t
  misc_feature (171)..(171): n is a, c, g, or t
  misc_feature (180)..(180): n is a, c, g, or t
  misc_feature (186)..(186): n is a, c, g, or t
  misc_feature (189)..(189): n is a, c, g, or t
  misc_feature (192)..(192): n is a, c, g, or t
  misc_feature (195)..(195): n is a, c, g, or t
  misc_feature (198)..(198): n is a, c, g, or t
  misc_feature (204)..(204): n is a, c, g, or t
  misc_feature (210)..(210): n is a, c, g, or t
  misc_feature (213)..(213): n is a, c, g, or t
  misc_feature (216)..(216): n is a, c, g, or t
  misc_feature (219)..(219): n is a, c, g, or t
  misc_feature (225)..(225): n is a, c, g, or t
  misc_feature (231)..(231): n is a, c, g, or t
  misc_feature (240)..(240): n is a, c, g, or t
  misc_feature (252)..(252): n is a, c, g, or t
  misc_feature (261)..(261): n is a, c, g, or t
  misc_feature (264)..(264): n is a, c, g, or t
  misc_feature (270)..(270): n is a, c, g, or t
  misc_feature (273)..(273): n is a, c, g, or t
  misc_feature (282)..(282): n is a, c, g, or t
  misc_feature (285)..(285): n is a, c, g, or t
  misc_feature (288)..(288): n is a, c, g, or t
  misc_feature (291)..(291): n is a, c, g, or t
  misc_feature (318)..(318): n is a, c, g, or t
  misc_feature (342)..(342): n is a, c, g, or t
  misc_feature (345)..(345): n is a, c, g, or t
  misc_feature (363)..(363): n is a, c, g, or t
  misc_feature (387)..(387): n is a, c, g, or t
caycaycaycaycaycaygaytayaargaygaygaygayaarggntayggnmgnaaraarmgnmgncarmgnmgnmgnggnatggcnggnwsngcnytngcngtnmgngcnmgnttyggngtntggggnatgaargtnytncaracnmgnggnttyggnwsngaycarwsngaraaygtngaymgnggngcnggngcnathmgngargcnggnggngcnttyggnaarmgngarcargcngargargarmgntayttymgngcncarwsnmgngarcarytngcngcnytnaaraarcayaargargargarathgtncaycayaaraargarathgarmgnytncaraargarathgarmgncayaarcaraarathaaratgytnaarcaygaygay

SEQ ID NO: 1682 - DNA, 399 bp, Artificial Sequence; identical to SEQ ID NO: 1681
  Designed; as detailed elsewhere in present application
  CDS (1)..(399)
  misc_feature (45)..(45): n is a, c, g, or t
  misc_feature (51)..(51): n is a, c, g, or t
  misc_feature (54)..(54): n is a, c, g, or t
  misc_feature (63)..(63): n is a, c, g, or t
  misc_feature (66)..(66): n is a, c, g, or t
  misc_feature (72)..(72): n is a, c, g, or t
  misc_feature (75)..(75): n is a, c, g, or t
  misc_feature (78)..(78): n is a, c, g, or t
  misc_feature (81)..(81): n is a, c, g, or t
  misc_feature (87)..(87): n is a, c, g, or t
  misc_feature (90)..(90): n is a, c, g, or t
  misc_feature (93)..(93): n is a, c, g, or t
  misc_feature (96)..(96): n is a, c, g, or t
  misc_feature (99)..(99): n is a, c, g, or t
  misc_feature (102)..(102): n is a, c, g, or t
  misc_feature (105)..(105): n is a, c, g, or t
  misc_feature (108)..(108): n is a, c, g, or t
  misc_feature (111)..(111): n is a, c, g, or t
  misc_feature (114)..(114): n is a, c, g, or t
  misc_feature (120)..(120): n is a, c, g, or t
  misc_feature (123)..(123): n is a, c, g, or t
  misc_feature (129)..(129): n is a, c, g, or t
  misc_feature (138)..(138): n is a, c, g, or t
  misc_feature (141)..(141): n is a, c, g, or t
  misc_feature (147)..(147): n is a, c, g, or t
  misc_feature (150)..(150): n is a, c, g, or t
  misc_feature (153)..(153): n is a, c, g, or t
  misc_feature (159)..(159): n is a, c, g, or t
  misc_feature (162)..(162): n is a, c, g, or t
  misc_feature (171)..(171): n is a, c, g, or t
  misc_feature (180)..(180): n is a, c, g, or t
  misc_feature (186)..(186): n is a, c, g, or t
  misc_feature (189)..(189): n is a, c, g, or t
  misc_feature (192)..(192): n is a, c, g, or t
  misc_feature (195)..(195): n is a, c, g, or t
  misc_feature (198)..(198): n is a, c, g, or t
  misc_feature (204)..(204): n is a, c, g, or t
  misc_feature (210)..(210): n is a, c, g, or t
  misc_feature (213)..(213): n is a, c, g, or t
  misc_feature (216)..(216): n is a, c, g, or t
  misc_feature (219)..(219): n is a, c, g, or t
  misc_feature (225)..(225): n is a, c, g, or t
  misc_feature (231)..(231): n is a, c, g, or t
  misc_feature (240)..(240): n is a, c, g, or t
  misc_feature (252)..(252): n is a, c, g, or t
  misc_feature (261)..(261): n is a, c, g, or t
  misc_feature (264)..(264): n is a, c, g, or t
  misc_feature (270)..(270): n is a, c, g, or t
  misc_feature (273)..(273): n is a, c, g, or t
  misc_feature (282)..(282): n is a, c, g, or t
  misc_feature (285)..(285): n is a, c, g, or t
  misc_feature (288)..(288): n is a, c, g, or t
  misc_feature (291)..(291): n is a, c, g, or t
  misc_feature (318)..(318): n is a, c, g, or t
  misc_feature (342)..(342): n is a, c, g, or t
  misc_feature (345)..(345): n is a, c, g, or t
  misc_feature (363)..(363): n is a, c, g, or t
  misc_feature (387)..(387): n is a, c, g, or t

SEQ ID NO: 1683 - DNA, 399 bp, Artificial Sequence; identical to SEQ ID NO: 1681
  Designed; as detailed elsewhere in present application
  CDS (1)..(399)
  misc_feature (45)..(45): n is a, c, g, or t
  misc_feature (51)..(51): n is a, c, g, or t
  misc_feature (54)..(54): n is a, c, g, or t
  misc_feature (63)..(63): n is a, c, g, or t
  misc_feature (66)..(66): n is a, c, g, or t
  misc_feature (72)..(72): n is a, c, g, or t
  misc_feature (75)..(75): n is a, c, g, or t
  misc_feature (78)..(78): n is a, c, g, or t
  misc_feature (81)..(81): n is a, c, g, or t
  misc_feature (87)..(87): n is a, c, g, or t
  misc_feature (90)..(90): n is a, c, g, or t
  misc_feature (93)..(93): n is a, c, g, or t
  misc_feature (96)..(96): n is a, c, g, or t
  misc_feature (99)..(99): n is a, c, g, or t
  misc_feature (102)..(102): n is a, c, g, or t
  misc_feature (105)..(105): n is a, c, g, or t
  misc_feature (108)..(108): n is a, c, g, or t
  misc_feature (111)..(111): n is a, c, g, or t
  misc_feature (114)..(114): n is a, c, g, or t
  misc_feature (120)..(120): n is a, c, g, or t
  misc_feature (123)..(123): n is a, c, g, or t
  misc_feature (129)..(129): n is a, c, g, or t
  misc_feature (138)..(138): n is a, c, g, or t
  misc_feature (141)..(141): n is a, c, g, or t
  misc_feature (147)..(147): n is a, c, g, or t
  misc_feature (150)..(150): n is a, c, g, or t
  misc_feature (153)..(153): n is a, c, g, or t
  misc_feature (159)..(159): n is a, c, g, or t
  misc_feature (162)..(162): n is a, c, g, or t
  misc_feature (171)..(171): n is a, c, g, or t
  misc_feature (180)..(180): n is a, c, g, or t
  misc_feature (186)..(186): n is a, c, g, or t
  misc_feature (189)..(189): n is a, c, g, or t
  misc_feature (192)..(192): n is a, c, g, or t
  misc_feature (195)..(195): n is a, c, g, or t
  misc_feature (198)..(198): n is a, c, g, or t
  misc_feature (204)..(204): n is a, c, g, or t
  misc_feature (210)..(210): n is a, c, g, or t
  misc_feature (213)..(213): n is a, c, g, or t
  misc_feature (216)..(216): n is a, c, g, or t
  misc_feature (219)..(219): n is a, c, g, or t
  misc_feature (225)..(225): n is a, c, g, or t
  misc_feature (231)..(231): n is a, c, g, or t
  misc_feature (240)..(240): n is a, c, g, or t
  misc_feature (252)..(252): n is a, c, g, or t
  misc_feature (261)..(261): n is a, c, g, or t
  misc_feature (264)..(264): n is a, c, g, or t
  misc_feature (270)..(270): n is a, c, g, or t
  misc_feature (273)..(273): n is a, c, g, or t
  misc_feature (282)..(282): n is a, c, g, or t
  misc_feature (285)..(285): n is a, c, g, or t
  misc_feature (288)..(288): n is a, c, g, or t
  misc_feature (291)..(291): n is a, c, g, or t
  misc_feature (318)..(318): n is a, c, g, or t
  misc_feature (342)..(342): n is a, c, g, or t
  misc_feature (345)..(345): n is a, c, g, or t
  misc_feature (363)..(363): n is a, c, g, or t
  misc_feature (387)..(387): n is a, c, g, or t

SEQ ID NO: 1684 - DNA, 122 bp, Artificial Sequence
  Designed; as detailed elsewhere in present application
gtgcacaccgtgtgccatagaatggcacatgtcattgcccacttctgtgtagacatggttctggtttaactaatatttgtctgtgtgctactaacagattataataaattgtcatcagtgaa

1. A cosmetic composition comprising (or consisting of) at least one [any] IF1 protein/fragment (or sequence variant thereof, including partially/completely retroinverse sequence thereof), and/or fusion protein(s) thereof (optionally comprising at least one Cell Penetrating Peptide [CPP] sequence, optionally a Tat and/or poly-arginine sequence, optionally partially/completely retroinverse sequence thereof), optionally lipidated (i.e. with at least one covalently bound lipidic/lipid moiety, optionally at least one fatty acid [optionally acylated to its N-terminus] e.g. [non-limiting] a myristoyl/palmitoyl/stearoyl group), optionally modified at its N-(non-limiting e.g. acylated [non-limiting e.g. acetylated]) and/or C-terminal (non-limiting e.g. amidated) ends, optionally wherein one or more amino-acids in the sequence are corresponding D-amino acids, optionally wherein one or more of its carboxyl groups are esterified, and/or at least one cosmetically acceptable salt, solvate, hydrate, prodrug, liposome, nanoparticle (e.g. lipid nanoparticle, LNP) or other vector of the art thereof;
optionally a cosmetic composition comprising (or consisting of) at least one peptide/protein (optionally with one or more of its carboxyl groups esterified) comprising (or consisting of) [preferably wherein the following is in N to C-terminal order] at least one Cell Penetrating Peptide sequence (CPP, e.g. a poly-arginine CPP, optionally with a fatty acid [e.g. of between 2 to 25 carbons] acylated to its N-terminal end) conjoined with (e.g. peptide bonded to) at least one Mitochondrial Import Sequence (MIS; conferring mitochondrial matrix localization, optionally/preferably wherein the MIS is that used by the species administered to for its native IF1 protein; e.g. MIS that human uses for its native IF1 protein) conjoined with (e.g. peptide bonded to) at least one “mature” (without MIS) IF1 protein/fragment (or sequence variant thereof) that is optionally/preferably an IF1 protein sufficiently truncated at its C-terminal end (e.g. truncated up to {using “mature” [without MIS] IF1 protein numbering} its 60^{th} or 47^{th} residue), and/or optionally truncated at its N-terminal end (e.g. by any number of residues up to 9 [or 13] residues), and/or with one or more amino acid substitutions in its “phosphorylation control switch” and/or “pH dependence motif” (e.g. one or more of {using “mature” [without MIS] IF1 protein numbering} S14A [or T14A], E26A [or Q26A or E26Q], H48A [or Y48A], H49K [or H49A or H49R], H55A [or Y55A or V55A], H56A [or T56A or S56A] substitutions), such that it can still inhibit F₁F₀ ATP hydrolysis but it cannot (or cannot as readily) form IF1 protein tetramers (and higher oligomers) at alkaline pH, preferably such that it can more potently inhibit F₁F₀ ATP hydrolysis at the normal, alkaline pH (˜pH 8) of the mitochondrial matrix (than native/unmodified IF1 protein), optionally/preferably wherein this IF1 protein/fragment (or sequence variant thereof) has a sequence derived/modified from the IF1 protein sequence of the species to be administered to [e.g. human] or a species with a longer maximal lifespan, optionally a species with a very long maximal lifespan such as a whale, e.g. bowhead or blue whale, and/or at least one cosmetically acceptable salt, solvate, hydrate, prodrug, liposome, nanoparticle (e.g. lipid nanoparticle, LNP) or other vector of the art thereof;
optionally a cosmetic composition comprising (or consisting of) at least one peptide/protein comprising (or consisting of) at least one sequence that is a designed concatenation of sequences that are each naturally occurring in the human body, e.g, wherein the CPP component is SEQ ID NO:455 (or SEQ ID NO:461, or residues 4-11 of SEQ ID NO:453), the MIS component is SEQ ID NO:162, and the IF1 protein/fragment sequence component is from human IF1 protein (non-limiting e.g. using “mature” [without MIS] IF1 protein numbering: residues: 1-60, 10-60, 14-60, 13-47, 14-47, 42-58, which are the amino acid sequences encoded by DNA sequences SEQ ID NO:1473, SEQ ID NO:1476, SEQ ID NO:1479, SEQ ID NO:1482, SEQ ID NO:1485, SEQ ID NO:1488 respectively), and/or at least one cosmetically acceptable salt, solvate, hydrate, prodrug, liposome, nanoparticle (e.g. lipid nanoparticle, LNP) or other vector of the art thereof;
optionally a cosmetic composition comprising (or consisting of) at least one peptide/protein comprising (or consisting of) at least one sequence selected from SEQ ID NO:166 to SEQ ID NO:438, and/or at least one fragment thereof (for non-limiting example wherein the epitope/affinity tag component [if present] is absent, and/or the Cell Penetrating Peptide component [if present] is absent), and/or concatenated fragments thereof, and/or a functional (can inhibit/reduce F₁F₀ ATP hydrolysis in a cell and/or in a Sub-Mitochondrial Particle [SMP] assay of F₁F₀ ATP hydrolysis) sequence variant(s) thereof (optionally produced by conservative substitution[s]), and/or at least one cosmetically acceptable salt, solvate, hydrate, prodrug, liposome, nanoparticle (e.g. lipid nanoparticle, LNP) or other vector of the art thereof;
preferably in a form suitable for application to the skin/scalp of a subject (preferably human), optionally their face;
preferably wherein the composition contains at least one cosmetically/dermatologically acceptable carrier;
optionally wherein the composition contains at least one further active agent, which can perform one or more of skin/scalp care/protection/treatment/repair/beautification/cleaning/fragrance/cosmetic purpose/appearance change, optionally for human skin/scalp, wherein a number of such agents are known in the art (non-limiting e.g. retinol and other retinoids).

2. A cosmetic composition according to claim 1 in at least one form/formulation selected from a group comprising (or consisting of): gel, emulsion, oil/water emulsion, water/oil emulsion, milk, lotion, ointment, stick, pencil, spray, cream, cream gel, multiple emulsion, anhydrous composition, aqueous dispersion, oil, balsam, foam, hydroalcoholic solution, hydroglycolic solution, hydrogel, liniment, sera, serum, mousse, pomade, powder, bar, aerosol, granule, solution, suspension, emulsion, syrup, polysaccharide film, jelly, gelatin, emollient lotion, emollient milk, emollient cream, emulsion of oil and/or silicone in water, emulsion of water in oil and/or silicone, balm, liquid, paste, aerosol, butter,
and/or incorporated into a product for administration/application to the human skin/scalp, optionally selected from a group comprising (or consisting of): cosmetic product for use upon the skin/scalp, cosmetic product for use upon the face, daily use skin care product, exfoliant, skin smoothing product, product for improving/smoothing skin texture, anti-aging/anti-wrinkle skin product/cream/serum, anti-hair loss product, hair growth promoting product, anti-hair greying product, hair dye, skin cream, face cream, eye cream, anti-acne/spot cream, moisterizer, cleanser, shampoo, conditioner, anti-dandruff product, soap, shower gel, scalp lotion, body oil, skin/body/face scrub, milk/cream for care of skin and/or hair, cleansing cream, foundation tint base, sunscreen/sunblock/sun cream (e.g. offering protection against UVA and/or UVB radiation), fake sun tan product, skin darkening product, skin whitening product/cream, shaving cream/foam/balm, perfume, aftershave, deodorant, anti-persperant, make-up product, lip rouge, lipstick, lip gloss, lip protector, mascara, nail varnish, concealer, under-eye concealer, blusher, mascara, make-up foundation, foundation, BB cream or CC cream or DD cream or similar, make-up removing product/lotion/milk/cream, eye shadow, unguent, anti-cellulite product, anti-stretch mark product, anti-varicose vein product, daily peel, face mask, eye mask, night mask, sleeping mask, toothpaste, mouthwash,
and/or incorporated/absorbed/adsorbed into one or more of a fabric, non-woven fabric, textile, a material used for clothing, garment, natural or synthetic fibre, wool, face mask, sleeping mask, eye mask, plaster, medical device, bandage, gauze, wipe, patch, adhesive skin patch, non-adhesive skin patch, microelectric patch, towelette, hydrogel,
and/or adsorbed on at least one cosmetically/pharmaceutically acceptable solid organic polymer or solid mineral support selected from the group comprising (or consisting of) talc, bentonite, silica, starch, maltodextrin or inorganic carrier, adsorbed on powdered organic and/or inorganic polymers.

3. At least one cosmetic composition according to one or more of claims 1-2 for use as a cosmetic, wherein an amount (preferably an effective amount e.g. a cosmetically effective amount) is administered to a subject, optionally wherein the subject self-administers,
preferably administered to the subject's skin/scalp, optionally their face, preferably wherein the subject is a human.

4. At least one cosmetic composition according to one or more of claims 1-2 for use in reducing/slowing/delaying/preventing/eliminating one or more visible signs of aging wherein it is administered to one or more areas of human skin (optionally already showing one or more signs of aging), preferably wherein said composition is applied at least once per day for a time period sufficient to provide an elimination/reduction/slowing/delay/prevention in the visible signs of aging of that portion of human skin, wherein said time period is at least 2 weeks.

5. An “immature” (with Mitochondrial Import Sequence, MIS) or “mature” (without MIS) IF1 protein/fragment (or sequence variant thereof), or fusion protein thereof, wherein one or more of the following applies to (is true of) part(s) or all of it (wherein all possible combinations are contemplated {including all possible combinations of elements/descriptors within, and across, different bullet points} except those that are mutually exclusive):
(i) produced/isolated/purified/substantially purified/partially purified;
(ii) associated with a pharmaceutically/cosmetically acceptable salt[s];
(iii) IF1 protein/fragment (or sequence variant thereof) component/entirety comprises (or consists of) bowhead whale (Balaena mysticetus) IF1 protein;
(iv) IF1 protein/fragment (or sequence variant thereof) component/entirety comprises (or consists of) blue whale (Balaenoptera musculus) IF1 protein;
(v) one or more (or two/three/four/five/six/seven/eight/nine/ten/eleven/twelve/thirteen/fourteen/fifteen/sixteen/seventeen or more) of the following is true of the IF1 protein/fragment (or sequence variant thereof) component/entirety: (using “mature” [without Mitochondrial Import Sequence, MIS] IF1 protein numbering): 49^{th} residue is not histidine, 14^{th} residue is not a residue that can be phosphorylated (i.e. is not serine or threonine), 26^{th} residue is not glutamic acid, 48^{th} residue is not histidine, 55^{th} residue is not histidine, 56^{th} residue is not histidine, 49^{th} residue is lysine or alanine or arginine, 14^{th} residue is alanine, 26^{th} residue is alanine or glutamine, 48^{th} residue is alanine, 55^{th} residue is alanine, 56^{th} residue is alanine, 79^{th} residue is glycine or asparagine, 76^{th} residue is lysine, 73^{rd} residue is serine, 62^{nd} residue is histidine, 82^{nd} residue is aspartic acid, 83^{rd} residue is aspartic acid, 84^{th} residue is aspartic acid, 85^{th} residue is aspartic acid, 57^{th} residue is valine, 54^{th} residue is serine or aspartic acid, 61^{st} residue is glutamine, 51^{st} residue is asparagine, 47^{th} residue is glutamic acid, 46^{th} residue is arginine, 44^{th} residue is serine, 39^{th} residue is lysine, 38^{th} residue is alanine or glutamic acid, 37^{th} residue is arginine or cysteine or lysine, 36^{th} residue is aspartic acid or glutamic acid, 29^{th} residue is histidine, 27^{th} residue is alanine, 25^{th} residue is lysine, 17^{th} residue is aspartic acid, 12^{th} residue is glycine, 11^{th} residue is serine or threonine, 10^{th} residue is serine or glycine, 9^{th} residue is glycine, 8^{th} residue is leucine or glycine, 6^{th} residue is aspartic acid or glycine, 5^{th} residue is alanine, 4^{th} residue is serine or glycine, 3^{rd} residue is glutamic acid or serine or lysine, 2nd residue is glycine, 1^{st} residue is leucine, wherein in particular sub-embodiments (wherein all possible combinations are contemplated, except if mutually exclusive):
(a) three (3) or more of the list is true;
(b) five (5) or more of the list is true;
(c) seven (7) or more of the list is true;
(d) nine (9) or more of the list is true;
(e) eleven (11) or more of the list is true;
(f) thirteen (12) or more of the list is true;
(g) fourteen (14) or more of the list is true;
(h) fifteen (15) or more of the list is true;
(i) sixteen (16) or more of the list is true;
(j) seventeen (17) or more of the list is true;
(k) at least one IF1 protein/fragment sequence variant comprises (or consists of) the IF1 protein/fragment sequence of human (or other species with a long maximal lifespan, optionally a species with a longer maximal lifespan than human) with one or more substitutions (and/or addition of one or more aspartic acid residues to its C-terminal end) to make one or more of the list be true;
(l) at least one IF1 protein/fragment sequence variant comprises (or consists of) the IF1 protein/fragment sequence of bowhead/blue whale with one or more substitutions (and/or addition of one or more aspartic acid residues to its C-terminal end) to make one or more of the list be true;
(vi) IF1 protein/fragment (or sequence variant thereof) component/entirety comprises (or consists of) a sequence variant of IF1 protein (preferably wherein one/two/three/four/five or more of the descriptors in bullet point (v) above apply to it) found in a long-lived species (high maximal lifespan), preferably which has an equal or greater maximal lifespan than Bos taurus, more preferably which has an equal or greater maximal lifespan than human, and more preferably which has a greater maximal lifespan than human e.g. bowhead or blue whale;
(vii) IF1 protein/fragment (or sequence variant thereof) component/entirety comprises (or consists of) an IF1 protein/fragment (optionally from mammal, Bos taurus, or human, or blue or bowhead whale) with one or more of {using “mature” [without MIS] IF1 protein numbering} S14A (or T14A), H49K (or H49A or H49R), E26A (or E26Q or Q26A), H48A (or Y48A), H55A (or Y55A), H56A (or T56A or S56A) substitutions, optionally also/instead with 1-3 (or 1-5) aspartic acid (D) residues added to its C-terminal end;
(viii) IF1 protein/fragment (or sequence variant thereof) component/entirety comprises (or consists of) human IF1 protein/fragment with one or more of {using “mature” [without MIS] IF1 protein numbering} S14A, H49K (or H49A or H49R), E26A (or E26Q), H48A, H55A, H56A substitutions, optionally also/instead with 1-3 (or 1-5) aspartic acid (D) residues added to its C-terminal end;
(ix) IF1 protein/fragment (or sequence variant thereof) component/entirety comprises (or consists of) blue whale IF1 protein/fragment with one or more of {using “mature” [without MIS] IF1 protein numbering} T14A, H49K (or H49A or H49R), E26A (or E26Q), H48A, H55A, H56A substitutions, optionally also/instead with 1-3 (or 1-5) aspartic acid (D) residues added to its C-terminal end;
(x) IF1 protein/fragment (or sequence variant thereof) component/entirety comprises (or consists of) bowhead whale IF1 protein/fragment with one or more of {using “mature” [without MIS] IF1 protein numbering} H49K (or H49A or H49R), E26A (or E26Q), H48A, H55A, H56A substitutions, optionally also/instead with 1-3 (or 1-5) aspartic acid (D) residues added to its C-terminal end;
(xi) IF1 protein/fragment (or sequence variant thereof) component/entirety comprises (or consists of) an IF1 protein fragment (using “mature” [without MIS] IF1 protein numbering) less than z amino acids long, wherein z is an integer selected from a group comprising 85, 84, 83, 82, 81, 80, 79, 78, 77, 76, 75, 74, 73, 72, 71, 70, 69, 68, 67, 66, 65, 64, 63, 62, 61, 60, 59, 58, 57, 56, 55, 54, 53, 52, 51, 50, 49, 48, 47, 46, 45, 44, 43, 42, 41, 40, 39, 38, 37, 36, 35, 34, 33, 32, 31, 30, 29, 28, 27, 26, 25, 24, 23, 22, 21, 20, 19, 18, 17, 16, 15, 14, 13, 12, 11, 10, 9, 8, 7, 6, 5, 4, 3, 2 [different values of z are different embodiments];
(xii) IF1 protein/fragment (or sequence variant thereof) component/entirety comprises (or consists of) an IF1 protein fragment (using “mature” [without MIS] IF1 protein numbering) x-y, where x is an integer between 1 and 20 (or between 1 and 44, or between 1 and 84), and y is an integer between 40 and 85 (or between 40 and 85, or between 2 and 85) [different values of x and/or y are different embodiments; within their aforementioned range constraints, all possible combinations of x and y integer values are contemplated];
(xiii) IF1 protein/fragment (or sequence variant thereof) component/entirety comprises (or consists of) an IF1 protein fragment selected from a group comprising (using “mature” [without MIS] IF1 protein numbering): 1-84, 2-84, 3-84, 4-84, 5-84, 6-84, 7-84, 8-84, 9-84, 10-84, 11-84, 12-84, 13-84, 14-84, 15-84, 16-84, 17-84, 18-84, 19-84, 20-84, 21-84, 22-84, 23-84, 24-84, 25-84, 26-84, 27-84, 28-84, 29-84, 30-84, 31-84, 32-84, 33-84, 34-84, 35-84, 36-84, 37-84, 38-84, 39-84, 40-84, 41-84, 42-84, 43-84, 44-84, 45-84, 46-84, 47-84, 48-84, 49-84, 50-84, 51-84, 52-84, 53-84, 54-84, 55-84, 56-84, 57-84, 58-84, 59-84, 60-84, 61-84, 62-84, 63-84, 64-84, 65-84, 66-84, 67-84, 68-84, 69-84, 70-84, 71-84, 72-84, 73-84, 74-84, 75-84, 76-84, 77-84, 78-84, 79-84, 80-84, 81-84, 82-84, 83-84, OR a sub-sequence/fragment of one of these aforementioned fragments;
(xiv) IF1 protein/fragment (or sequence variant thereof) component/entirety comprises (or consists of) an IF1 protein fragment selected from a group comprising: IF1 protein residues {using “mature” [without MIS] IF1 protein numbering}: 14-47, 13-47, 12-47, 11-47, 10-47, 9-47, 8-47, 7-47, 6-47, 5-47, 4-47, 3-47, 2-47, 1-47, 14-48, 14-46, 14-45, 14-44, 14-43, 14-42, 13-48, 13-46, 13-45, 13-44, 13-43, 13-42, 12-48, 12-46, 12-45, 12-44, 12-43, 12-42, 11-48, 11-46, 11-45, 11-44, 11-43, 11-42, 10-48, 10-46, 10-45, 10-44, 10-43, 10-42, 42-58, 42-59, 1-56, 1-57, 1-58, 1-59, 1-60, 10-56, 10-57, 10-58, 10-59, 10-60, 14-60, 10-84, 14-84, 18-84, 10-50, 1-45, 42-56, 42-47, 48-56, 49-55;
(xv) IF1 protein/fragment (or sequence variant thereof) component/entirety comprises (or consists of) IF1 protein residues [preferably from a species with a maximal lifespan at least as long as Bos taurus, more preferably from a very long-lived mammal e.g. human, or (more preferred) blue or bowhead whale] (using “mature” [without MIS] IF1 protein numbering): one or more of (or sequence variant thereof) 10-47, 13-47, 14-47, 1-56, 1-57, 1-58, 1-59, 1-60, 10-56, 10-57, 10-58, 10-59, 10-60, preferably wherein, if the 14^{th} residue isn't alanine, it is substituted to be alanine;
(xvi) IF1 protein/fragment (or sequence variant thereof) component/entirety comprises (or consists of) human IF1 protein residues (using “mature” [without MIS] IF1 protein numbering): one or more of (or sequence variant thereof) 10-47, 13-47, 14-47, 1-56, 1-57, 1-58, 1-59, 1-60, 10-56, 10-57, 10-58, 10-59, 10-60, preferably with a S14A substitution;
(xvii) IF1 protein/fragment (or sequence variant thereof) component/entirety comprises (or consists of) whale (non-limiting e.g. selected from a group comprising bowhead, fin, blue, humpback, killer, sperm, gray, Cuvier's beaked, long-finned pilot whale) IF1 protein residues (using “mature” [without MIS] IF1 protein numbering): one or more of (or sequence variant thereof) 10-47, 13-47, 14-47, 1-56, 1-57, 1-58, 1-59, 1-60, 10-56, 10-57, 10-58, 10-59, 10-60, preferably wherein, if the 14^{th} residue isn't alanine, it is substituted to be so;
(xviii) IF1 protein/fragment (or sequence variant thereof) component/entirety comprises (or consists of) blue whale IF1 protein residues (using “mature” [without MIS] IF1 protein numbering): one or more of (or sequence variant thereof) 10-47, 13-47, 14-47, 1-56, 1-57, 1-58, 1-59, 1-60, 10-56, 10-57, 10-58, 10-59, 10-60, preferably with a T14A substitution;
(xix) IF1 protein/fragment (or sequence variant thereof) component/entirety comprises (or consists of) bowhead whale IF1 protein residues (using “mature” [without MIS] IF1 protein numbering): one or more of (or sequence variant thereof) 10-47, 13-47, 14-47, 1-56, 1-57, 1-58, 1-59, 1-60, 10-56, 10-57, 10-58, 10-59, 10-60;
(xx) IF1 protein/fragment (or sequence variant thereof) component/entirety comprises (or consists of) mammal/Bos Taurus/rodent/mouse/rat/rabbit IF1 protein residues (using “mature” [without MIS] IF1 protein numbering): one or more of (or sequence variant thereof) 10-47, 13-47, 14-47, 1-56, 1-57, 1-58, 1-59, 1-60, 10-56, 10-57, 10-58, 10-59, 10-60, 42-58, 42-59;
(xxi) IF1 protein/fragment (or sequence variant thereof) component/entirety comprises (or consists of) IF1 protein residues (using “mature” [without MIS] IF1 protein numbering): 42-58 or 42-59 (or sequence variant thereof);
(xxii) IF1 protein/fragment (or sequence variant thereof) component/entirety comprises (or consists of) human IF1 protein residues (using “mature” [without MIS] IF1 protein numbering): 42-58 or 42-59 (or sequence variant thereof), optionally with one or more of E51N, V54S, K57V substitutions;
(xxiii) IF1 protein/fragment (or sequence variant thereof) component/entirety comprises (or consists of) IF1 protein fragment shorter than 40 (or 35, or 30, or 25, or 20, or 15, or 10, or 5) amino acids, which contains H49 residue (or sequence variant thereof);
(xxiv) IF1 protein/fragment (or sequence variant thereof) component/entirety comprises (or consists of) short-living mammal (e.g. rodent, e.g. mouse) IF1 protein fragment shorter than 40 (or 35, or 30, or 25, or 20, or 15, or 10, or 5) amino acids, which contains H49 residue (or sequence variant thereof);
(xxv) IF1 protein/fragment (or sequence variant thereof) component/entirety comprises (or consists of) IF1 protein fragment (or sequence variant thereof) from a species that will be administered with the peptide/protein (and/or composition thereof);
(xxvi) IF1 protein/fragment (or sequence variant thereof) component/entirety comprises (or consists of) IF1 protein fragment (or sequence variant thereof) from a species with a maximal lifespan at least as long as Bos taurus, more preferably from a very long-lived mammal e.g. human, or (more preferred) blue or bowhead whale;
(xxvii) IF1 protein/fragment (or sequence variant thereof) component/entirety comprises (or consists of) IF1 protein fragment (or sequence variant thereof) from a mammal species with a maximal lifespan at least as short as mouse;
(xxviii) IF1 protein/fragment (or sequence variant thereof) component/entirety comprises (or consists of) married/combined fragment(s) and/or residue(s) of IF1 protein sequences from two or more different species, preferably wherein at least one of these species has a high maximal lifespan, preferably equal to or longer than human e.g. human, bowhead or blue whale, more preferably longer than human e.g. bowhead or blue whale;
(xxix) modified at its N- and/or C-terminal ends, optionally amidation/esterification of the C-terminus and/or acylation (e.g. acetylation) of the N-terminus;
(xxx) at least one IF1 protein/fragment (or sequence variant thereof), and/or IF1 protein/fragment (or sequence variant thereof) containing fusion protein, has a fatty acid (optionally linear or branched, saturated or unsaturated, containing 2 to 100 carbon atoms, more preferably from 2 to 25 carbon atoms; or derivative thereof) acylated to its N-terminus, non-limiting e.g. myristoyl/palmitoyl/stearoyl group conjugated to N-terminus;
(xxxi) a sequence, containing a number (integer selected from between 1 and 8) of amino acid residues (optionally wherein one or more are hydrophobic {optionally at least as hydrophobic as phenylalanine}, and/or one or more are positively charged {e.g. are lysine and/or arginine}, and/or one or more are reasonably hydrophobic with an ability to adopt a positive charge {e.g. histidine}), is peptide-bonded to the N-terminus, optionally wherein a fatty acid (or a derivative thereof) is conjugated/acylated to the resultant N-terminus of this fusion protein, and/or conjugated/acylated to the side-chain of one or more of these additional amino acid residues, optionally wherein at least one of these additional residues is a lysine, and a fatty acid is conjugated/acylated to its side-chain (optionally via a “spacer” moiety, which can be for non-limiting example, an amino acid(s) [e.g. L-γ-glutamic acid] or a dipeptide(s), or L-γ-glutamic acid and two OEG {8-amino-3,6-dioxaoctanoic acid} units), optionally wherein at least one of these added residues is cysteine, and a cholesterol derivative (e.g. cholesterol modified with a cysteine-reactive 2-bromoacetyl moiety) or fatty acid derivative (e.g. [hydrogen atoms not shown]: S—C—C(COOH)—N—C(O)—(C)ₙ wherein n is between 2 and 100, preferably between 2 and 25) is conjugated to its side-chain by a disulphide bond, preferably wherein this added sequence only has one lipophilic (fatty acid/cholesterol or derivative thereof) moiety attached in total, wherein a preferred fatty acid is linear or branched, saturated or unsaturated, containing between 2 to 100 carbon atoms, more preferably between 2 to 25 carbon atoms, optionally wherein an attached fatty acid is a myristoyl/palmitoyl/stearoyl group;
(xxxii) at least one cysteine residue in the amino acid sequence, optionally inserted/substituted into the sequence, optionally a cysteine present or substituted into the correspondent position to the (using “mature” [without MIS] IF1 protein numbering) 37^{th} amino acid position of the IF1 protein/fragment (or sequence variant thereof) [incidentally, gray whale IF1 protein has a cysteine residue in this position], which has a cholesterol derivative (e.g. cholesterol modified with a cysteine-reactive 2-bromoacetyl moiety) or a fatty acid (or derivative thereof) conjugated to it, preferably via a disulphide bond, optionally wherein the fatty acid derivative is [hydrogen atoms not shown]: S—C—C(COOH)—N—C(O)—(C)ₙ wherein n is between 2 and 100, preferably between 2 and 25, wherein (C) n can be linear or branched, saturated or unsaturated;
(xxxiii) part(s) or all is cyclized, in one or more cycles;
(xxxiv) part(s) or all is bicyclic via attachment to a scaffold(s), optionally rendered bicyclic by judicious insertion of cysteine residues which confer attachment to a scaffold structure by thioether and/or disulphide bonds;
(xxxv) Na-alkylated (e.g. N^{α}-methylated) at one or more places;
(xxxvi) contains one or more corresponding (to its sequence) D-amino acids;
(xxxvii) contains one or more retroinverse regions, or all of it is retroinverse;
(xxxviii) IF1 protein/fragment (or sequence variant thereof) component/entirety is retroinverse;
(xxxix) at least one of its carboxylic groups is esterified, optionally such that one or more of its carboxyl (COOH) groups is replaced by the group (or analogue thereof): [chemical structure]
wherein R_{A} is (independently at each point of use) an alkyl or alkoxy (optionally at the para position on the indicated phenyl ring) or halogen, n is between 0 and 3, R is an alkyl, alkenyl, alkynyl group or hydrogen, R_{M} is an alkyl, alkenyl, alkynyl, cycloalkyl, aryl, or arylalkyl group which is optionally substituted with one or more alkyl, alkoxy, aryl, alkylaryl, halogen, haloalkyl, or haloalkoxy group, for example:

[chemical structure]

6. IF1 protein/fragment (or sequence variant thereof), or fusion protein thereof, according to claim 5 wherein (from a sub-list(s) and or the overall list) x or more aspects/features/descriptors/modifications are true of it, wherein x is an integer selected from the group comprising: 2, 3, 4, 5, 6, 7, 8, 9, 10, 11, 12, 13, 14, 15, 16, 17, 18, 19, 20 [different values of x are different embodiments].

7. A fusion protein according to claim 6 comprising (or consisting of):
(i) at least one Mitochondrial Import Sequence (MIS) [for delivery into the mitochondrial matrix], optionally in the order (N-terminal shown first): [MIS]-[IF1 protein/fragment (or sequence variant thereof)]; or
(ii) at least one epitope/affinity tag and at least one MIS [for delivery into the mitochondrial matrix], optionally in the order (N-terminal shown first): [epitope/affinity tag]-[MIS]-[IF1 protein/fragment (or sequence variant thereof)]; or
(iii) at least one MIS [for delivery into the mitochondrial matrix] and at least one Cell Penetrating Peptide (CPP) sequence, optionally in the order (N-terminal shown first): [CPP]-[MIS]-[IF1 protein/fragment (or sequence variant thereof)]; or
(iv) at least one epitope/affinity tag and at least one MIS [for delivery into the mitochondrial matrix] and at least one CPP sequence, optionally in the order (N-terminal shown first): [epitope/affinity tag]-[CPP]-[MIS]-[IF1 protein/fragment (or sequence variant thereof)].

8. A fusion protein according to claim 7, wherein one or more of the following applies to (is true of) part(s) or all of it (wherein all possible combinations are contemplated {including all possible combinations of elements/descriptors within, and across, different bullet points} except those that are mutually exclusive):
(i) produced/isolated/purified/substantially purified/partially purified;
(ii) associated with a pharmaceutically/cosmetically acceptable salt[s];
(iii) Mitochondrial Import Sequence (MIS) is the same that a species uses for one or more of its proteins that it transports from the cytoplasm into the mitochondrial matrix, optionally wherein the MIS is the same that a species uses for its native IF1 protein;
(iv) MIS is that for an IF1 protein from human or mouse;
(v) MIS and IF1 protein/fragment (or sequence variant thereof) are from different species;
(vi) MIS and IF1 protein/fragment (or sequence variant thereof) are from different species, optionally wherein the former is from a species that will be administered with the fusion protein and the latter is from a different species, preferably from a longer-living species than the subject (to be administered) species, preferably from a very long-lived species (e.g. bowhead or blue whale);
(vii) MIS and IF1 protein/fragment (or sequence variant thereof) are from same species;
(viii) IF1 protein/fragment is from Bos taurus/human/bowhead whale/blue whale/mouse/rat/naked mole rat (or sequence variant thereof), MIS is from a different species;
(ix) MIS is from human, and IF1 protein/fragment (or sequence variant thereof) is from a different species, optionally Bos taurus/whale/bowhead whale/blue whale/mouse/rat/naked mole rat;
(x) MIS is from mouse, and IF1 protein/fragment (or sequence variant thereof) is from a different species, optionally Bos taurus/whale/bowhead whale/blue whale/rat/naked mole rat;
(xi) MIS is from a species, and IF1 protein/fragment (or sequence variant thereof) is from a longer-living species (higher maximal lifespan);
(xii) MIS is from a species, and IF1 protein fragment (or sequence variant thereof) is from a shorter-living species (lower maximal lifespan);
(xiii) MIS is from a species, and IF1 protein fragment (or sequence variant thereof) has more residues from the N-terminal than C-terminal half of IF1 protein, preferably from a longer-living species (higher maximal lifespan);
(xiv) MIS is from a species, and IF1 protein fragment (or sequence variant thereof) has more residues from the C-terminal than N-terminal half of IF1 protein, preferably from a shorter-living species (lower maximal lifespan);
(xv) MIS is from a species, and the IF1 protein fragment (or sequence variant thereof) is from a different species, preferably a longer-living species (higher maximal lifespan), and comprises (or consists of) {using “mature” [without MIS] IF1 protein numbering} one or more of (or sequence variant thereof) 10-47, 13-47, 14-47, 1-56, 1-57, 1-58, 1-59, 1-60, 10-56, 10-57, 10-58, 10-59, 10-60, 42-58, 42-59 residues;
(xvi) MIS is from a species, and the IF1 protein fragment (or sequence variant thereof) is from a different species, preferably a shorter-living species (lower maximal lifespan), wherein it is shorter than 40 (or 35, or 30, or 25, or 20, or 15, or 10) amino acids, and contains the H49 residue (using “mature” [without MIS] IF1 protein numbering);
(xvii) is (in total or in part[s]) retroinverse, optionally wherein the Mitochondrial Import Sequence (MIS) is not retroinverse;
(xviii) MIS is excluded from being retroinverse, but other part(s) can be;
(xix) MIS is not retroinverse but the IF1 protein/fragment (or sequence variant thereof) is retroinverse (in entirety or in part[s]);
(xx) MIS is not retroinverse but the IF1 protein/fragment (or sequence variant thereof) and/or Cell Penetrating Peptide (CPP) sequence is retroinverse (in entirety or in part[s]);
(xxi) CPP component(s) is one or more of a Tat sequence(s) (and/or sequence variant(s) thereof of the art), Penetratin sequence(s) (and/or sequence variant(s) thereof of the art), poly-Arginine sequence(s) (and/or sequence variant(s) thereof of the art),
optionally YGRKKRRQRRRG [SEQ ID NO:446] (optionally wherein the terminal glycine is absent), optionally RRRRRRRG [SEQ ID NO:461] (optionally wherein the terminal glycine is absent), optionally wherein one or more of the amino acids can be corresponding D-amino acids, optionally wherein part(s) or all of the CPP component(s) is retroinverse;
(xxii) epitope/affinity tag component(s) comprises (or consists of) one or more of poly-histidine, any of SEQ ID NO:130 to SEQ ID NO:144 e.g. HHHHHHDYDDDDK [SEQ ID NO:136];
(xxiii) CPP component(s) is flanked on one or both sides, optionally just on its C-terminal end (which is concatenated to the MIS component), by zero or more glycine and/or proline residues, optionally between 0 and 5 residues, optionally 1 such residue;
(xxiv) CPP component(s) is bound to the remainder of the fusion protein by a disulphide (by judicious insertion and/or substitution of cysteine residues) or peptide bond(s), or mixture thereof (i.e. some of the IF1 fusion proteins have their CPP bound by a disulphide bond, others by a peptide bond), optionally wherein a cysteine residue is at the C-terminal end of the CPP, which is disulphide bonded to an inserted/substituted N-terminal/internal cysteine in the MIS or IF1 protein/fragment (or sequence variant thereof) component of the fusion protein, optionally wherein the cysteine is (using “mature” [without MIS] IF1 protein numbering) present at (in legacy to the IF1 protein/fragment, or sequence variant thereof, used e.g. if from gray whale), or substituted into, the 37^{th} position;
(xxv) modified at its N- and/or C-terminal ends, optionally amidation/esterification of the C-terminus and/or acylation (e.g. acetylation) of the N-terminus;
(xxvi) at least one IF1 protein/fragment (or sequence variant thereof), and/or IF1 protein/fragment (or sequence variant thereof) containing fusion protein, has a fatty acid (optionally linear or branched, saturated or unsaturated, containing 2 to 100 carbon atoms, more preferably from 2 to 25 carbon atoms; or derivative thereof) conjugated/acylated to its N-terminus, non-limiting e.g. myristoyl/palmitoyl/stearoyl group acylated to N-terminus;
(xxvii) a sequence, containing a number (integer selected from between 1 and 8) of amino acid residues (optionally wherein one or more are hydrophobic {optionally at least as hydrophobic as phenylalanine}, and/or one or more are positively charged {e.g. are lysine and/or arginine}, and/or one or more are reasonably hydrophobic with an ability to adopt a positive charge {e.g. histidine}), is peptide-bonded to the N-terminus, optionally wherein a fatty acid (or a derivative thereof) is conjugated/acylated to the resultant N-terminus of this fusion protein, and/or conjugated/acylated to the side-chain of one or more of these additional amino acid residues, optionally wherein at least one of these additional residues is a lysine, and a fatty acid is conjugated/acylated to its side-chain (optionally via a “spacer” moiety, which can be for non-limiting example, an amino acid(s) [e.g. L-γ-glutamic acid] or a dipeptide(s), or L-γ-glutamic acid and two OEG {8-amino-3,6-dioxaoctanoic acid} units), optionally wherein at least one of these added residues is cysteine, and a cholesterol derivative (e.g. cholesterol modified with a cysteine-reactive 2-bromoacetyl moiety) or fatty acid derivative (e.g. [hydrogen atoms not shown]: S—C—C(COOH)—N—C(O)—(C)ₙ wherein n is between 2 and 100, preferably between 2 and 25) is conjugated to its side-chain by a disulphide bond, preferably wherein this added sequence only has one lipophilic (fatty acid/cholesterol or derivative thereof) moiety attached in total, wherein a preferred fatty acid is linear or branched, saturated or unsaturated, containing between 2 to 100 carbon atoms, more preferably between 2 to 25 carbon atoms, optionally wherein an attached fatty acid is a myristoyl/palmitoyl/stearoyl group;
(xxviii) at least one cysteine residue in the amino acid sequence, optionally inserted/substituted into the sequence, optionally a cysteine present or substituted into the correspondent position to the (using “mature” [without MIS] IF1 protein numbering) 37^{th} amino acid position of the IF1 protein/fragment (or sequence variant thereof) [incidentally, gray whale IF1 protein has a cysteine residue in this position], which has a cholesterol derivative (e.g. cholesterol modified with a cysteine-reactive 2-bromoacetyl moiety) or a fatty acid (or derivative thereof) conjugated to it, preferably via a disulphide bond, optionally wherein the fatty acid derivative is [hydrogen atoms not shown]: S—C-C(COOH)—N—C(O)—(C)ₙ wherein n is between 2 and 100, preferably between 2 and 25, wherein (C)ₙ can be linear or branched, saturated or unsaturated;
(xxix) part(s) or all is cyclic, optionally bicyclic, optionally where it is rendered bicyclic by judicious insertion of cysteine residues which confer attachment to a scaffold structure by thioether and/or disulphide bonds, optionally wherein, for a IF1 protein/fragment (or sequence variant thereof) containing fusion protein, if present, the CPP sequence(s) (optionally a CPP sequence(s) with precedent use in a bicyclic form from the literature) is confined to one cycle, and the MIS and IF1 protein/fragment (or sequence variant thereof) is confined to the other cycle of a bicyclic structure, optionally wherein the sequence attached to the scaffold is of the form (where IF1 below can refer to a “mature” IF1 protein(s) and/or a IF1 sequence variant(s)/fragment(s)/fragment sequence variant(s) thereof): Cys-CPP-Cys-MIS-IF1-Cys;
(xxx) N^{α}-alkylated (e.g. N^{α}-methylated) at one or more places;
(xxxi) comprises (or consists of) one or more corresponding (to its sequence) D-amino acids;
(xxxii) is (in total or in part[s]) retroinverse, optionally wherein if it contains a Mitochondrial Import Sequence (MIS), this is not retroinverse, optionally wherein the Mitochondrial Import Sequence (MIS) is not retroinverse and the IF1 protein/fragment (or sequence variant thereof) and/or Cell Penetrating Peptide (CPP) sequence is retroinverse (in entirety or in part[s]);
(xxxiii) at least one of its carboxylic groups is esterified, optionally such that one or more of its carboxyl (COOH) groups is replaced by the group (or analogue thereof): [chemical structure]
wherein R_{A} is (independently at each point of use) an alkyl or alkoxy (optionally at the para position on the indicated phenyl ring) or halogen, n is between 0 and 3, R is an alkyl, alkenyl, alkynyl group or hydrogen, R_{M} is an alkyl, alkenyl, alkynyl, cycloalkyl, aryl, or arylalkyl group which is optionally substituted with one or more alkyl, alkoxy, aryl, alkylaryl, halogen, haloalkyl, or haloalkoxy group,
for example:

[chemical structure]

9. A (optionally produced/isolated/purified/substantially purified/partially purified) peptide/protein comprising (or consisting of) at least one sequence selected from SEQ ID NO:166 to SEQ ID NO:438, or a fragment thereof (for non-limiting example wherein the epitope/affinity tag component [if present] is absent, and/or the Cell Penetrating Peptide component [if present] is absent), or concatenated fragments thereof, and/or a sequence variant(s) thereof (which is very preferably functional {can inhibit/reduce F₁F₀ ATP hydrolysis in a cell and/or in a Sub-Mitochondrial Particle [SMP] assay of F₁F₀ ATP hydrolysis}, optionally incorporating one or more conservative substitutions), optionally wherein one or more of the listed options in one or more of claims 5-8 apply to the sequence[s] (non-limiting e.g. associated with a pharmaceutically/cosmetically acceptable salt[s], esterified, modified at N- and/or C-terminal ends, N-terminal pre-sequence attached, cholesterol derivative(s) and/or fatty acid(s) [or derivative(s) thereof] attached, cyclized, bicyclic, corresponding D-amino acid at one or more places, one or more parts are retroinverse, N^{α}-alkylated {e.g. N^{α}-methylated} etc. [all combinations contemplated except those that are mutually exclusive]).

10. A (optionally produced/isolated/purified/substantially purified/partially purified) polynucleotide, optionally cDNA, encoding at least one peptide/protein sequence from one or more of claims 5-9,
optionally wherein one or more of the codons, optionally all the codons, used for each amino acid are the most (or one of the most) frequently used for each amino acid in the codon bias of at least one species that will express the polynucleotide;
and/or
wherein the polynucleotide comprises (or consists of) one or more sequences selected from SEQ ID NO:1426 to SEQ ID NO:1684,
or a pharmaceutical/cosmetic composition thereof.

11. A vector/plasmid of the art (non-limiting e.g. liposome, nanoparticle, lipid nanoparticle [LNP] etc.), or a pharmaceutical/cosmetic composition thereof, comprising at least one polynucleotide of claim 10; one or more vectors/plasmids (of the art) each comprising at least one polynucleotide of claim 10.

12. A cell comprising at least one vector/plasmid of claim 11; one or more cells each comprising at least one vector/plasmid of claim 11; optionally wherein the cell(s) can be bacterial (non-limiting e.g. E. coli), yeast (non-limiting e.g. Saccharomyces cerevisiae), immortalized mammalian (non-limiting e.g. human) cell line, insect cell, or other cell type(s) used for recombinant protein expression in the art.

13. A method/process for producing/manufacturing a protein(s)/peptide(s) from claims 5-9 comprising culturing (e.g. in/atop a nutrient medium) one or more cells of claim 12 under conditions suitable for the expression of at least one polynucleotide of claim 10, and recovering said protein(s)/peptide(s) therefrom, optionally by way of an epitope/affinity tag sequence component, optionally wherein this tag is then removed, optionally by the epitope/affinity tag sequence being connected to one end of the desired peptide/protein sequence(s), optionally the N-terminal end, by a cleavable linker sequence that is cleaved.

14. A gene therapy/vector of the art, or a pharmaceutical/cosmetic composition thereof, comprising at least one polynucleotide of claim 10, optionally a gene therapy/vector of the art for (disproportional) delivery to:
(i) one or more skin/scalp cells; and/or
(ii) one or both eyes/ears; and/or
(iii) one or more brain regions and/or one or more brain cell/neuron/glia types/populations; and/or
(iv) a population(s) of cells/body region(s), e.g. a population of brain cells/brain region(s)/eye cells, that tends to age faster, and/or lose optimal function earlier in life, than other parts of the body (in that species), optionally wherein this loss is a drive to an age-correlated disease(s)/disorder(s) e.g. a neurodegenerative disease (e.g. Parkinson's disease), e.g. an age-correlated eye disorder(s)/disease(s) such as Age-related Macular Degeneration (AMD);
optionally wherein the gene therapy vector is an Adeno-Associated Virus (AAV), optionally AAV9 or AAV2;
especially preferred is using a gene therapy vector that is used in an FDA/EMA approved gene therapy and/or that has passed Phase I clinical trialing or/and otherwise proven safe in humans.

15. A transgenic organism, preferably/restrictively a non-human transgenic organism, optionally a transgenic microorganism, optionally a non-human transgenic mammal, optionally a transgenic mouse, containing at least one polynucleotide of claim 10.

16. At least one peptide/protein sequence of claims 5-9, and/or at least one pharmaceutically/cosmetically acceptable salt, solvate, hydrate, prodrug, liposome, nanoparticle (e.g. lipid nanoparticle, LNP) or other vector of the art thereof, and/or at least one polynucleotide of claim 10 [and/or at least one vector(s) of claim 11, and/or gene therap(y/ies) of claim 14, and/or at least one cell(s) of claim 12, and/or at least one transgenic organism(s) of claim 15] for use in the manufacture of a medicament or a pharmaceutical/cosmetic composition;
at least one peptide/protein sequence of claims 5-9, and/or at least one pharmaceutically/cosmetically acceptable salt, solvate, hydrate, prodrug, liposome, nanoparticle (e.g. lipid nanoparticle, LNP) or other vector of the art thereof, and/or at least one polynucleotide of claim 10 [and/or at least one vector(s) of claim 11, and/or at least one gene therap(y/ies) of claim 14, and/or at least one cell(s) of claim 12, and/or at least one transgenic organism(s) of claim 15] for use in the manufacture of a medicament for the treatment/amelioration/prevention/combat/reversal/slowing/delaying of aging (and/or increasing lifespan and/or healthspan), and/or an unwanted/undesirable aspect(s)/sign(s) of aging and/or an age-correlated (risk of incidence increases with subject age) disorder(s)/disease(s) (e.g. a neurodegenerative disease[s]), in a subject;
at least one peptide/protein sequence of claims 5-9, and/or at least one pharmaceutically/cosmetically acceptable salt, solvate, hydrate, prodrug, liposome, nanoparticle (e.g. lipid nanoparticle, LNP) or other vector of the art thereof, and/or at least one polynucleotide of claim 10 [and/or at least one vector(s) of claim 11, and/or at least one gene therap(y/ies) of claim 14, and/or at least one cell(s) of claim 12, and/or at least one transgenic organism(s) of claim 15] for use in the manufacture of a medicament/cosmetic/supplement for the treatment/amelioration/prevention/combat/reversal/slowing/delaying of skin/scalp aging and/or one or more signs of skin/scalp aging/photoaging/age-correlated damage (non-limiting e.g. lateral canthal lines (crow's feet), liver/age spot(s), wrinkle(s) [e.g. facial wrinkles], fine lines in the skin (e.g. around eyes and/or mouth), expression lines, dark circles/“bags” under the eyes, hair greying/loss etc.), optionally in a pharmaceutical/cosmetic/supplement composition of the art for topical/skin/scalp/transdermal (e.g. human skin/scalp) administration, optionally a cream/lotion/spray/gel/oil/liquid/foam/paste/aerosol/butter/patch/make-up/shampoo/soap thereof.

17. Method of screening for least one IF1 protein fragment that can inhibit/reduce F₁F₀ ATP hydrolysis in a Sub-Mitochondrial Particle [SMP] assay of F₁F₀ ATP hydrolysis, at alkaline pH (e.g. pH 8), in which endogenous/native IF1 protein is not removed,
preferably wherein a number of different IF1 protein fragments are systematically tested, preferably by one or more of the following methods:
(1) wherein the first IF1 protein fragment tested consists of the most C-terminal (last) residue of an IF1 protein (non-limiting e.g. of Bos taurus), the second fragment tested consists of the last two residues, the third fragment consists of the last three residues, the fourth fragment consists of the last four residues, and this testing is iterated in this fashion, adding a residue each time (optionally testing until the N-terminal end of the IF1 protein is reached, or stopping before this, optionally stopping once the 47^{th} or 42^{nd} residue [from the N-terminal end, using “mature” {without MIS} IF1 protein numbering] is reached, or when a residue nearby is reached);
then, with each fragment found to have inhibition/reduction of F₁F₀ ATP hydrolysis activity, the fragment sequence is tested again but with its most C-terminal (last) absent, and then again iteratively, each time with one more amino acid removed from its C-terminal end, until the activity is lost or until there are no residues remaining;
(2) wherein the first IF1 protein fragment tested consists of IF1 protein residues (using “mature” [without MIS] IF1 protein numbering): 42-58, and then in the next test, the 43-58 fragment is tested, then 44-58, then 45-58 etc., wherein with each new test, the fragment has one less amino acid at its N-terminal end, until there are no more fragments left to test (the same method but coming instead from the C-terminal end is contemplated also);
optionally wherein one or more of the following apply (wherein all possible combinations are contemplated {including all possible combinations of elements/descriptors within, and across, different bullet points} except those that are mutually exclusive):
(i) the SMPs are from a mammal;
(ii) the SMPs are from a species that is to be administered with the IF1 protein fragment(s) (and/or sequence variant(s) thereof), or fusion protein(s) thereof, selected by the assay, and/or from a closely/not too distantly related species (e.g. if humans are to be administered, the SMPs can be from bovine);
(iii) the assayed IF1 protein fragment(s) (and/or sequence variant(s) thereof) is/are from a mammal;
(iv) the IF1 protein fragment(s) (and/or sequence variant(s) thereof) assayed is/are from a species that is to be administered with the IF1 fragment(s), or fusion protein(s) thereof, selected by the assay, and/or from a closely/not too distantly related species;
(v) the IF1 protein fragment(s) (and/or sequence variant(s) thereof) is from a short(er)-living species, but preferably a species not too evolutionarily divergent from a species that is to be administered with the IF1 fragment(s) (and/or sequence variant(s) thereof), or fusion protein(s) thereof, selected by the assay, wherein shorter living mammals have more strongly/tightly joined IF1 tetramers (and higher oligomers), wherein they are bound to each other in their C-terminal halves, and so a C-terminal IF1 fragment from a shorter-living mammal binds a C-terminal part of an IF1 protein more tightly (if the evolutionary distance between them isn't too great);
optionally wherein the method(s) is repeated with fragments from the IF1 protein of a different species, optionally wherein it is performed with fragments from the IF1 protein of a number of different species;
optionally wherein each IF1 protein fragment(s) (or sequence variant(s) thereof) selected by this method (i.e. shown to reduce F₁F₀ ATP hydrolysis) is tested in an SMP assay of F₁F₀ ATP synthesis, optionally wherein if it appreciably reduces F₁F₀ ATP synthesis also, it is dismissed.

18. A vector of the art for a polynucleotide, preferably a gene therapy vector of the art, optionally an Adeno-Associated Virus (AAV) [optionally AAV2 administered to the eye(s)], comprising at least one polynucleotide coding for at least one [any] IF1 protein/fragment
(or sequence variant thereof,
optionally wherein {using “mature” [without MIS] IF1 protein numbering} it has a H49K (or H49A or H49R) substitution and, if its 14^{th} residue is not alanine, it is substituted to be alanine),
optionally derived from that of a long lived mammal species (e.g. whale species [longer living species preferred e.g. bowhead or blue whale]) and/or long-lived reptile species e.g. a tortoise/turtle/terrapin etc.)
or a pharmaceutical/cosmetic composition thereof;
especially preferred is using a gene therapy vector that is used in an FDA/EMA approved gene therapy and/or that has passed Phase I clinical trialing or/and otherwise proven safe in humans.

19. At least one (optionally produced/isolated/purified/substantially purified/partially purified) [any] IF1 protein/fragment (or sequence variant thereof), and/or a fusion protein(s) thereof (optionally containing a CPP sequence(s)), and/or at least one pharmaceutically/cosmetically acceptable salt, solvate, hydrate, prodrug, liposome, nanoparticle (e.g. lipid nanoparticle, LNP) or other vector of the art thereof, and/or at least one polynucleotide coding for at least one [any] IF1 protein/fragment (or sequence variant thereof) and/or a fusion protein(s) thereof (optionally containing a CPP sequence(s)) [and/or vector(s)/plasmid(s)/liposome/(s)/nanoparticle(s)/gene therap[y/ies] thereof, and/or cell(s)/transgenic cell(s)/transgenic organism(s) thereof], for use in the manufacture of a medicament or a pharmaceutical/cosmetic composition;
at least one (optionally produced/isolated/purified/substantially purified/partially purified) [any] IF1 protein/fragment (or sequence variant thereof), and/or fusion protein(s) thereof (optionally containing a CPP sequence(s)), and/or at least one pharmaceutically/cosmetically acceptable salt, solvate, hydrate, prodrug, liposome, nanoparticle (e.g. lipid nanoparticle, LNP) or other vector of the art thereof, and/or at least one polynucleotide coding for at least one [any] IF1 protein/fragment (or sequence variant thereof) and/or fusion protein(s) thereof (optionally containing a CPP sequence(s)) [and/or vector(s)/plasmid(s)/liposome(s)/nanoparticle(s)/gene therap[y/ies] thereof, and/or cell(s)/transgenic cell(s)/transgenic organism(s) thereof], for use in the manufacture of a medicament for the treatment/amelioration/prevention/combat/reversal/slowing/delaying of aging (and/or increasing lifespan and/or healthspan), and/or an unwanted/undesirable aspect(s)/sign(s) of aging and/or an age-correlated (risk of incidence increases with subject age) disorder(s)/disease(s) (e.g. a neurodegenerative disease[s]), in a subject;
at least one (optionally produced/isolated/purified/substantially purified/partially purified) [any] IF1 protein/fragment (or sequence variant thereof), and/or a fusion protein(s) thereof (optionally containing a CPP sequence(s)), and/or at least one pharmaceutically/cosmetically acceptable salt, solvate, hydrate, prodrug, liposome, nanoparticle (e.g. lipid nanoparticle, LNP) or other vector of the art thereof, and/or at least one polynucleotide coding for at least one [any] IF1 protein/fragment (or sequence variant thereof) and/or a fusion protein(s) thereof (optionally containing a CPP sequence(s)) [and/or vector(s)/plasmid(s)/liposome(s)/nanoparticle(s)/gene therap[y/ies] thereof, and/or cell(s)/transgenic cell(s)/transgenic organism(s) thereof], for use in the manufacture of a medicament/cosmetic/supplement for the treatment/amelioration/prevention/combat/reversal/slowing/delaying of skin/scalp aging and/or one or more signs of skin/scalp aging/photoaging/age-correlated damage (non-limiting e.g. lateral canthal lines (crow's feet), liver/age spot(s), wrinkle(s) [e.g. facial wrinkles], fine lines in the skin (e.g. around eyes and/or mouth), expression lines, dark circles/“bags” under the eyes, hair greying/loss etc.), optionally in a pharmaceutical/cosmetic/supplement composition of the art for skin/scalp/transdermal (e.g. human skin/scalp) administration, optionally a cream/lotion/spray/gel/oil/liquid/foam/paste/aerosol/butter/patch/make-up/shampoo/soap thereof,
optionally wherein one or more of the following apply to it (wherein all possible combinations are contemplated {including all possible combinations of elements/descriptors within, and across, different bullet points} except those that are mutually exclusive):
(i) comprises at least one [any] IF1 protein (or sequence variant thereof) and at least one [any] IF1 protein fragment (or sequence variant thereof);
(ii) comprises multiple different IF1 protein and/or IF1 protein fragment sequences, optionally wherein one or more are sequence variants, optionally wherein two or more are different (optionally overlapping) fragments from the same IF1 protein (from the same species) or from the same sequence variant thereof;
(iii) at least one IF1 protein(s)/fragment(s) (or sequence variant thereof) is from a long-lived species (e.g. with a long maximal lifespan) e.g. from a long lived mammal species (e.g. whale species [longer living species preferred e.g. bowhead or blue whale]) and/or long-lived reptile species e.g. a tortoise/turtle/terrapin etc;
(iv) at least one IF1 protein(s)/fragment(s) (or sequence variant thereof) is from human.

20. At least one compound and/or composition for use in a method of treating/ameliorating/preventing/combating/reversing/slowing/delaying aging in a subject (and/or, in the subject, increasing their lifespan and/or healthspan and/or treating/ameliorating/preventing/combating/reversing/slowing/delaying an unwanted/undesirable aspect(s)/sign(s) of aging and/or one or more of an age-correlated disorder(s)/disease(s)/damage(s)/sign(s)/decline in function(s)/decline in aesthetic(s)) wherein the method comprises increasing the amount of (at least one type of) IF1 protein (and/or sequence variant(s) thereof) in the subject.

21. At least one compound and/or composition for use according to claim 20 wherein at least some of the extra IF1 protein is an IF1 protein sequence from a different species, optionally a longer-living (higher maximal lifespan) species than the subject's species, optionally a very long-lived species (high maximal lifespan).

22. At least one compound and/or composition for use according to claim 20, wherein at least some of the extra IF1 protein is an IF1 protein (from same or different species than the subject, optionally from a longer-living species, optionally from a very long-lived species) sequence variant with (using mature {without MIS} IF1 protein residue numbering) lysine or alanine or arginine as its 49^{th} residue, and/or alanine as its 14^{th} residue.

23. At least one compound and/or composition for use according to claim 20, wherein a majority, optionally all, of the subject's cells have an increased amount of (at least one type of) IF1 protein (and/or sequence variant(s) thereof).

24. At least one compound and/or composition for use in a method of treating/ameliorating/preventing/combating/reversing/slowing/delaying aging in a subject (and/or, in the subject, increasing their lifespan and/or healthspan and/or treating/ameliorating/preventing/combating/reversing/slowing/delaying an unwanted/undesirable aspect(s)/sign(s) of aging and/or one or more of an age-correlated disorder(s)/disease(s)/damage(s)/sign(s)/decline in function(s)/decline in aesthetic(s)) wherein the method comprises administering to the subject (and/or the subject self-administering), systemically and/or locally/topically to the subject's body part(s)/organ(s)/tissue(s)/cell population(s)/cell(s) where the effect(s) is (most) sought (e.g. to one or more areas of skin/scalp e.g. one or more areas of the face, e.g. to one or both eyes/ears, e.g. to one or more joints), optionally as part of a pharmaceutical/cosmetic/supplement composition/medicament, an amount (preferably an effective amount e.g. a therapeutically/cosmetically effective amount) of (optionally produced/isolated/purified/substantially purified/partially purified) at least one [any] IF1 protein/fragment (or sequence variant thereof) and/or (optionally produced/isolated/purified/substantially purified/partially purified) at least one fusion protein comprising at least one [any] IF1 protein/fragment (or sequence variant thereof), and/or at least one pharmaceutically/cosmetically acceptable salt, solvate, hydrate, prodrug, liposome, nanoparticle (e.g. lipid nanoparticle, LNP) or other vector of the art thereof, optionally comprising an N-terminal Cell Penetrating Peptide (CPP) sequence(s) concatenated to a Mitochondrial Import Sequence(s) (MIS(s)) concatenated to a (preferably “mature” i.e. without its MIS) IF1 protein/fragment (or sequence variant thereof), and/or (optionally produced/isolated/purified/substantially purified/partially purified) at least one polynucleotide coding for at least one [any] IF1 protein/fragment (or sequence variant thereof), and/or a fusion protein(s) thereof, and/or a vector(s)/plasmid(s)/liposome(s)/nanoparticle(s)/gene therap[y/ies]/cell(s) thereof, and/or at least one pharmaceutical/cosmetic composition thereof.

25. At least one compound and/or composition for use according to claim 24 wherein one or more of the following applies/is true (wherein all possible combinations are contemplated {including all possible combinations of elements/descriptors within, and across, different bullet points} except those that are mutually exclusive):
(i) at least one IF1 protein/fragment (or sequence variant thereof), and/or at least one IF1 protein/fragment (or sequence variant thereof) containing fusion protein, is according to one or more of claims 5-9;
(ii) at least one polynucleotide is according to claim 10;
(iii) at least one vector/plasmid is according to claim 11;
(iv) at least one cell is according to claim 12;
(v) at least one gene therapy is according to one or more of claims 14, 18;
(vi) at least one medicament or pharmaceutical/cosmetic composition is according to one or more of claims 16, 19;
(vii) at least one IF1 protein/fragment (or sequence variant thereof), and/or IF1 protein/fragment (or sequence variant thereof) component to a fusion protein, is part, or the entirety, of the subject's species' native IF1 protein, or a sequence variant thereof;
(viii) at least one IF1 protein/fragment (or sequence variant thereof), and/or IF1 protein/fragment (or sequence variant thereof) component to a fusion protein, is from a species that tends to live longer (e.g. has a greater maximal lifespan) than the subject's species, optionally/preferably from one of the most long-lived species on Earth e.g. bowhead whale;
(ix) at least one IF1 protein/fragment (or sequence variant thereof), and/or IF1 protein/fragment (or sequence variant thereof) component to a fusion protein, is a fusion of fragment(s)/residue(s) of IF1 protein sequences from two or more different species, optionally with one or more (preferably single residue) substitutions/insertions/deletions atop at one or more positions, preferably at less than 10 positions;
(x) at least one IF1 protein/fragment (or sequence variant thereof), and/or IF1 protein/fragment (or sequence variant thereof) component to a fusion protein, has a Mitochondrial Import Sequence [MIS] attached (preferably by peptide bond to its N-terminal end) that is the same as an MIS that the subject's/subject's species' uses to transport one or more of its endogenous/native proteins from the cytoplasm to the mitochondrial matrix, optionally the MIS that the subject's/subject's species' uses for its endogenous/native IF1 protein;
(xi) at least one IF1 protein fragment (or sequence variant thereof) is administered;
(xii) at least one IF1 protein (or sequence variant thereof) and at least one IF1 protein fragment (or sequence variant thereof) is administered;
(xiii) multiple different IF1 protein and/or IF1 protein fragment sequences, optionally wherein one or more are sequence variants, optionally wherein two or more different (optionally overlapping) fragments from the same IF1 protein (from the same species) or from the same sequence variant thereof, are administered;
(xiv) at least one IF1 protein/fragment (or sequence variant thereof) is functional as a stand-alone/separate peptide/protein i.e. it can inhibit/reduce F₁F₀ ATP hydrolysis (e.g. inside a cell, preferably a eukaryote cell, and/or in a Sub-Mitochondrial Particle (SMP) assay of the art, which assays F₁F₀ ATP hydrolysis [functional in an SMP assay with native IF1 protein removed and/or present]), optionally/preferably wherein it confers greater inhibition of F₁F₀ ATP hydrolysis than a naturally occurring IF1 protein at pH 8;
(xv) at least one IF1 protein/fragment (or sequence variant thereof) has one or more conservative substitutions, and/or one or more non-conservative substitutions, and is functional i.e. it can inhibit/reduce F₁F₀ ATP hydrolysis (e.g. inside a cell, preferably a eukaryote cell, and/or in a Sub-Mitochondrial Particle (SMP) assay of the art, which assays F₁F₀ ATP hydrolysis [functional in an SMP assay with native IF1 protein removed and/or present]), optionally/preferably wherein it has greater inhibitory activity against F₁F₀ ATP hydrolysis than a naturally occurring IF1 protein at pH 8;
(xvi) at least one IF1 protein/fragment (or sequence variant thereof) has notable/high sequence identity (e.g. one or more of ≥28%, ≥30%, >40%, ≥50%, ≥60%, ≥70%, ≥75%, ≥80%, ≥85%, ≥90%, ≥95%, ≥96%, >97%, ≥98%, ≥99% sequence identity and/or less than 12, or less than 10, or less than 8, or less than 6, or less than 5, or less than 4, or less than 3, or 1 to 2 single residue substitutions/insertions/deletions away from a native IF1 protein sequence or fragment(s) thereof) to the entirety, or part, of at least one IF1 protein from a species, and is functional i.e. it can inhibit/reduce F₁F₀ ATP hydrolysis (e.g. inside a cell, preferably a eukaryote cell, and/or in a Sub-Mitochondrial Particle (SMP) assay of the art, which assays F₁F₀ ATP hydrolysis [functional in an SMP assay with native IF1 protein removed and/or present]), optionally/preferably wherein it has greater inhibitory activity against F₁F₀ ATP hydrolysis than a naturally occurring IF1 protein at pH 8.

26. At least one compound and/or composition for use according to one or more of claims 20-25 wherein administration is local/topical, instead of systemic, and so any ensuing reduction in endogenic/metabolic heat production in (and optionally around) the administered area (caused by less F₁F₀ ATP hydrolysis in that area) is compensated for by heat transfer from other body regions, especially via blood flow, maintaining (at or close to) the optimal body temperature (e.g. ˜37° C. in a mammal) in/around the administered area;
optionally wherein administration is local/topical to the skin/scalp, optionally in a pharmaceutical/cosmetic/supplement composition of the art for skin/scalp/transdermal (e.g. human skin/scalp) administration, optionally a cream/lotion/spray/gel/oil/liquid/foam/paste/aerosol/butter/patch/make-up/shampoo/soap thereof, optionally wherein this administration acts to slow/delay/reverse/treat/ameliorate/prevent/combat skin/scalp aging (e.g. one or more signs of skin aging/photoaging/age-correlated damage: non-limiting e.g. lateral canthal lines (crow's feet), liver/age spot(s), wrinkle(s) [e.g. facial wrinkles], fine lines in the skin (e.g. around eyes and/or mouth), expression lines, dark circles/“bags” under the eyes, hair greying/loss etc.);
optionally wherein administration is local/topical to one or both eyes, optionally in a pharmaceutical composition of the art for eye administration, optionally one or more of eye drop(s), intravitreal injection(s), contact lens coating/solution (optionally wherein the contact lens has little to no refractive ability or wherein the contact lens is prescriptive to the refractive defect/error of the subject's eye(s)) thereof, optionally wherein this administration acts to slow/delay/reverse/treat/ameliorate/prevent/combat eye(s) aging and/or at least one eye(s) aging related disease/disorder, including any eye disease(s)/disorder(s) whose likelihood of onset increases with age and/or worsens with age, including (to illustrate and not restrict) age-related macular degeneration (AMD, early/intermediate/late), age-related wet macular degeneration, neovascular/wet AMD, dry AMD, Geographic atrophy (G A), wet and dry AMD in the same eye(s), Stargardt's macular degeneration, Best vitelliform macular dystrophy, diabetic retinopathy, proliferative diabetic retinopathy, diabetic macular edema, vision loss, progressive vision impairment, myopia (short-sightedness), degenerative myopia, hyperopia (far-sightedness), accommodative dysfunction, glaucoma, progressive glaucoma, cataract formation, retinal degeneration, progressive retinal degeneration, retinitis pigmentosa, leber hereditary optic neuropathy, Fuchs spot, Best's disease, Sorsby's fundus dystrophy.

27. At least one compound and/or composition for use according to one or more of claims 20-25 wherein administration is systemic, and optionally the subject is monitored, for example by a healthcare professional(s) and/or machine substitute(s), for sign(s) of reduction in body temperature and/or the subject is located at an ambient temperature that maintains their body temperature within safe limits whilst they have an effective amount of administered compound(s)/composition(s) in their system and/or the subject wears (and/or is covered by) insulating material(s), e.g. clothing/clothes (and/or bedding/blanket(s)), and/or is in a heated/insulated space and/or hot climate, optionally exceeding 25° C. or 28° C. or 30° C. or 35° C. or 36° C. or 37° C., optionally at or around 37° C., wherein a high (e.g. in the thirties ° C. i.e. 3x° C. where x is a number between 0 and 9), but safe, ambient temperature (and/or greater bodily insulation, for example by clothing/clothes and/or bedding/blanket(s)) can permit a greater compound(s)/composition(s) dose(s) to be safely administered, wherein a preferred ambient temperature is the thermoneutral temperature for the subject with the amount of bodily insulation they have, e.g. the amount of clothing they are wearing, if any, and the amount of the administered compound(s)/composition(s) in their body/system;
optionally wherein the subject wears one or more items of clothing, and/or is sheltered, and/or is in a heated and/or insulated confinement/room/space, some or all of the time whilst they have an amount (e.g. effective amount e.g. a therapeutically/cosmetically effective amount) of the administered compound(s)/composition(s) in their body/system;
optionally wherein the subject is administered (and/or self-administers) the compound(s)/composition(s) shortly before they sleep, preferably wherein they are sheltered (e.g. inside instead of outside) and/or insulated (e.g. by bedding(s)/blanket(s), and/or clothing, and the like) whilst they sleep, optionally in a heated room/building/confinement that is set to a higher (safe) temperature than outside it.

28. An IF1 protein/fragment (or sequence variant thereof), or fusion protein thereof, optionally a pharmaceutically/cosmetically acceptable salt, solvate, hydrate, prodrug, liposome, nanoparticle (e.g. lipid nanoparticle, LNP) or other vector of the art thereof, wherein one or more of the following applies to it (wherein all possible combinations are contemplated {including all possible combinations of elements/descriptors within, and across, different bullet points} except those that are mutually exclusive), wherein some functional significance is disclosed in this present claim:
(i) contains one or more corresponding (to its sequence) D-amino acids;
(ii) contains one or more retroinverse regions, or all of it is retroinverse, optionally wherein the Cell Penetrating Peptide (CPP) component (if present) is retroinverse (in part or entirety) and/or the IF1 protein/fragment (or sequence variant thereof) is retroinverse (in part or entirety);
(iii) N^{α}-alkylated (e.g. N^{α}-methylated) at one or more places;
(iv) part(s) or all is cyclized, in one or more cycles;
(v) part(s) or all is bicyclic via attachment to a scaffold(s), optionally rendered bicyclic by judicious insertion of cysteine residues which confer attachment to a scaffold structure by thioether and/or disulphide bonds;
(vi) modified at its N- and/or C-terminal ends, optionally amidation/esterification of the C-terminus and/or acylation (e.g. acetylation) of the N-terminus;
wherein one or more of the aforementioned features reduces susceptibility to protease(s) in the blood and increases peptide/protein half-life in the blood circulation of a subject (increases its plasma stability);
(vii) at least one of its carboxylic groups is esterified, optionally such that one or more of its carboxyl (COOH) groups is replaced by the group (or analogue thereof): [chemical structure]
wherein R_{A} is (independently at each point of use) an alkyl or alkoxy (optionally at the para position on the indicated phenyl ring) or halogen, n is between 0 and 3, R is an alkyl, alkenyl, alkynyl group or hydrogen, R_{M} is an alkyl, alkenyl, alkynyl, cycloalkyl, aryl, or arylalkyl group which is optionally substituted with one or more alkyl, alkoxy, aryl, alkylaryl, halogen, haloalkyl, or haloalkoxy group, for example: [chemical structure]
wherein this esterification confers (or enhances) the ability to passage a biological/plasma membrane(s), wherein the moiety/moieties attached by an ester bond are cleaved off by esterases once the peptide/protein enters a cell;
this esterification also (sterically) reduces susceptibility to proteases in the blood and so increase plasma half-life;
(viii) at least one IF1 protein/fragment (or sequence variant thereof), and/or IF1 protein/fragment (or sequence variant thereof) containing fusion protein, has a fatty acid (optionally linear or branched, saturated or unsaturated, containing 2 to 100 carbon atoms, more preferably from 2 to 25 carbon atoms; or derivative thereof) acylated to its N-terminus, non-limiting e.g. myristoyl/palmitoyl/stearoyl group conjugated to N-terminus;
(ix) a sequence, containing a number (integer selected from between 1 and 8) of amino acid residues (optionally wherein one or more are hydrophobic {optionally at least as hydrophobic as phenylalanine}, and/or one or more are positively charged {e.g. are lysine and/or arginine}, and/or one or more are reasonably hydrophobic with an ability to adopt a positive charge {e.g. histidine}), is peptide-bonded to the N-terminus, optionally wherein a fatty acid (or a derivative thereof) is conjugated/acylated to the resultant N-terminus of this fusion protein, and/or conjugated/acylated to the side-chain of one or more of these additional amino acid residues, optionally wherein at least one of these additional residues is a lysine, and a fatty acid is conjugated/acylated to its side-chain (optionally via a “spacer” moiety, which can be for non-limiting example, an amino acid(s) [e.g. L-γ-glutamic acid] or a dipeptide(s), or L-γ-glutamic acid and two OEG {8-amino-3,6-dioxaoctanoic acid} units), optionally wherein at least one of these added residues is cysteine, and a cholesterol derivative (e.g. cholesterol modified with a cysteine-reactive 2-bromoacetyl moiety) or fatty acid derivative (e.g. [hydrogen atoms not shown]: S—C—C(COOH)—N—C(O)—(C)ₙ wherein n is between 2 and 100, preferably between 2 and 25) is conjugated to its side-chain by a disulphide bond, preferably wherein this added sequence only has one lipophilic (fatty acid/cholesterol or derivative thereof) moiety attached in total, wherein a preferred fatty acid is linear or branched, saturated or unsaturated, containing between 2 to 100 carbon atoms, more preferably between 2 to 25 carbon atoms, optionally wherein an attached fatty acid is a myristoyl/palmitoyl/stearoyl group;
(x) at least one cysteine residue in the amino acid sequence, optionally inserted/substituted into the sequence, optionally a cysteine present or substituted into the correspondent position to the (using “mature” [without MIS] IF1 protein numbering) 37^{th} amino acid position of the IF1 protein/fragment (or sequence variant thereof) [incidentally, gray whale IF1 protein has a cysteine residue in this position], which has a cholesterol derivative (e.g. cholesterol modified with a cysteine-reactive 2-bromoacetyl moiety) or a fatty acid (or derivative thereof) conjugated to it, preferably via a disulphide bond, optionally wherein the fatty acid derivative is [hydrogen atoms not shown]: S—C—C(COOH)—N—C(O)—(C)ₙ wherein n is between 2 and 100, preferably between 2 and 25, wherein (C)ₙ can be linear or branched, saturated or unsaturated;
conjugated fatty acid (or derivative thereof) confers self-association and/or binding to albumin in the blood, which (sterically) decreases protease(s) access to peptide/protein, and/or slows its renal clearance, thence increasing its half-life in blood (e.g. from minutes to hours);
conjugated cholesterol/fatty acid (or derivative thereof) increases lipophibicity and confers (or enhances) the ability to passage a biological/plasma membrane(s);
when cholesterol/fatty acid (or derivative thereof) is attached by a disulphide bond, this attachment breaks once inside the reducing intracellular environment;
the pre-sequence/residue increases peptide/protein lipophibicity, which confers (or enhances) its ability to passage a biological/plasma membrane(s), and/or contributes positive charge which enhances the ability to passage into a live cell (negative inside);
in preferred cases, wherein this pre-sequence/residue/attachment is more N-terminal in the fusion protein than a Mitochondrial Import Sequence (MIS), it is inherently cleaved from the IF1 protein/fragment (or sequence variant thereof) when the MIS is cleaved off, in the mitochondrial matrix;
(xi) Cell Penetrating Peptide (CPP) component(s) to fusion protein, which comprises (or consists of) R7 [SEQ ID NO:455] or RRRRRRRG [SEQ ID NO:461] or RRRRRRRP [residues 4-11 of SEQ ID NO:453];
confers better cellular penetration than a Tat sequence; correspondent to amino acid sequences found within the human and mouse proteome and so less immunogenic in those species (amongst others) than a Tat sequence (for example); optional terminal glycine (G) or proline (P) confers flexibility at its C-terminal connection point to fusion protein;
(xii) Mitochondrial Import Sequence (MIS) and IF1 protein/fragment (or sequence variant thereof) components to fusion protein are from different species;
this permits the MIS to be from a species that will be administered the fusion protein, facilitating its better delivery into the mitochondrial matrix in that species, and the IF1 protein/fragment (or sequence variant thereof) to be from a different, longer living species (a species with a greater maximal lifespan);
(xiii) IF1 protein/fragment (or sequence variant thereof) component/entirety comprises (or consists of) that from a long-lived species, preferably at least as long-living as Bos taurus, more preferably from one of the longest-lived species/mammals on Earth e.g. bowhead or blue whale;
(xiv) one or more (or two/three/four/five/six/seven/eight/nine/ten/eleven/twelve/thirteen/fourteen/fifteen/sixteen/seventeen or more) of the following is true of the IF1 protein/fragment (or sequence variant thereof) component/entirety: (using “mature” [without Mitochondrial Import Sequence (MIS)] IF1 protein numbering): 49^{th} residue is not histidine, 14^{th} residue is not a residue that can be phosphorylated (i.e. is not serine or threonine), 26^{th} residue is not glutamic acid, 48^{th} residue is not histidine, 55^{th} residue is not histidine, 56^{th} residue is not histidine, 49^{th} residue is lysine or alanine or arginine, 14^{th} residue is alanine, 26^{th} residue is alanine or glutamine, 48^{th} residue is alanine, 55^{th} residue is alanine, 56^{th} residue is alanine, 79^{th} residue is glycine or asparagine, 76^{th} residue is lysine, 73^{rd} residue is serine, 62^{nd} residue is histidine, 82^{nd} residue is aspartic acid, 83^{rd} residue is aspartic acid, 84^{th} residue is aspartic acid, 85^{th} residue is aspartic acid, 57^{th} residue is valine, 54^{th} residue is serine or aspartic acid, 61^{st} residue is glutamine, 51^{st} residue is asparagine, 47^{th} residue is glutamic acid, 46^{th} residue is arginine, 44^{th} residue is serine, 39^{th} residue is lysine, 38^{th} residue is alanine or glutamic acid, 37^{th} residue is arginine or cysteine or lysine, 36^{th} residue is aspartic acid or glutamic acid, 29^{th} residue is histidine, 27^{th} residue is alanine, 25^{th} residue is lysine, 17^{th} residue is aspartic acid, 12^{th} residue is glycine, 11^{th} residue is serine or threonine, 10^{th} residue is serine or glycine, 9^{th} residue is glycine, 8^{th} residue is leucine or glycine, 6^{th} residue is aspartic acid or glycine, 5^{th} residue is alanine, 4^{th} residue is serine or glycine, 3^{rd} residue is glutamic acid or serine or lysine, 2^{nd} residue is glycine, 1^{st} residue is leucine;
(xv) IF1 protein/fragment (or sequence variant thereof) component/entirety is truncated, without C-terminal regions required for dimerization, teteramerization and higher oligomerization, for example it is only IF1 protein residues {using “mature” [without MIS] IF1 protein numbering}: 14-47 (or 10-47 or 13-47 or 1-56 or 1-58 or 1-60 or 10-56 or 10-58 or 10-60), preferably wherein if its 14^{th} residue isn't alanine, it is substituted to be alanine;
(xvi) IF1 protein/fragment (or sequence variant thereof) component/entirety is truncated, without the ability to inhibit F₁F₀ ATP hydrolysis itself, but wherein it binds at least one part in the C-terminal half of a complete IF1 protein, wherein (because it is truncated appropriately) its binding doesn't occlude the more N-terminal IF1 protein component that inhibits F₁F₀ ATP hydrolysis, but it does occlude one or more of the IF1 protein parts involved in tetramer (and higher) oligomerization (sequesteration) at alkaline pH (e.g. pH 8, normal pH of mitochondrial matrix), liberating IF1 dimers/monomers that can inhibit F₁F₀ ATP hydrolysis at pH 8; advantageously such an IF1 protein/fragment (or sequence variant thereof) tends to be shorter (better for intracellular delivery) than a IF1 protein/fragment (or sequence variant thereof) that can inhibit F₁F₀ ATP hydrolysis itself (e.g. aforementioned IF1 protein residues: 14-47); this particular approach relies on the endogenous IF1 protein and so works best in longer-living species which tend to have more, and/or more potent, IF1 protein; with this approach it is preferred for the IF1 protein/fragment (or sequence variant thereof) to be from the species to be administered or a shorter-living species (IF1 protein from a longer-living species binds ATP synthase more tightly/potently, and other IF1 proteins {to form IF1 protein tetramers and higher oligomers} less tightly; IF1 protein from a shorter-living species binds ATP synthase less tightly/potently and other IF1 proteins {to form IF1 protein tetramers and higher oligomers} more tightly; so shorter-living species have more tightly bound IF1 tetramers {and higher oligomers} and so a IF1 protein/fragment {or sequence variant thereof} solely designed to bind another IF1 protein is better sourced from a shorter than a longer-living species, but preferably from a species not too far evolutionarily removed from a/each species to be administered); preferably this IF1 protein/fragment (or sequence variant thereof) is less than 25 amino acids long, more preferably less than 20;
wherein one or more of the aforementioned features confers increased ability to inhibit/reduce F₁F₀ ATP hydrolysis at alkaline pH e.g. at pH 8 [which is the normal pH of the mitochondrial matrix] e.g. in a Sub-Mitochondrial Particle (SMP) assay of F₁F₀ ATP hydrolysis and/or in a cell and/or in a subject;
wherein one or more of the aforementioned features, when the peptide/protein is administered to a subject, confers increased ability to slow aging (conferring increased associated benefit(s), e.g. increased cosmetic(s) and/or therapeutic effect(s), thereof) in the subject.

29. An organism, preferably/restrictively a non-human organism, optionally a mouse, which has an H49K (or H49A or H49R), and/or S14A (or T14A), substitution in the IF1 protein produced by its mutated/modified ATPIF1 (ATP5IF1) gene,
or/and
a transgenic organism, preferably/restrictively a non-human transgenic organism, optionally a transgenic microorganism, preferably a non-human transgenic mammal, optionally a transgenic mouse, containing/expressing/constitutively expressing at least one transgenic ATPIF1 gene(s) (and/or sequence variant thereof; and/or IF1 protein/fragment [and/or sequence variant thereof] coding polynucleotide sequence[s] without (or with less) introns), optionally at least one (wherein all possible combinations are contemplated {including all possible combinations of elements/descriptors within, and across, different bullet points} except those that are mutually exclusive):
(i) polynucleotide sequence coding for/expressing at least one IF1 protein from a longer living species (longer maximal lifespan), preferably which (using “mature” [without MIS] IF1 protein numbering) has a H49K (or H49A or H49R) substitution and, if its 14^{th} residue is not already alanine, it is substituted to be alanine; or
(ii) polynucleotide sequence coding for/expressing an IF1 protein from blue whale (Balaenoptera musculus), preferably which (using “mature” [without MIS] IF1 protein numbering) has H49K (or H49A or H49R) and/or T14A substitutions; or
(iii) polynucleotide sequence coding for/expressing an IF1 protein from bowhead whale (Balaena mysticetus), preferably which (using “mature” [without MIS] IF1 protein numbering) has an H49K (or H49A or H49R) substitution; or
(iv) polynucleotide sequence coding for/expressing an IF1 protein from human, which (using “mature” [without MIS] IF1 protein numbering) has H49K (or H49A or H49R) and S14A substitutions; or
(v) polynucleotide sequence coding for/expressing at least one IF1 protein fragment (or sequence variant thereof) concatenated at its N-terminal end to a Mitochondrial Import Sequence (MIS, for transport into the mitochondrial matrix), preferably an MIS that the organism species uses for one of one or more proteins it transports from the cytoplasm to the mitochondrial matrix, more preferably the MIS that it uses for its endogenous/native IF1 protein, wherein the IF1 protein fragment (or sequence variant thereof) can optionally be:
(a) IF1 protein fragment (or sequence variant thereof) less than z amino acids long, wherein z is an integer selected from a group comprising 85, 84, 83, 82, 81, 80, 79, 78, 77, 76, 75, 74, 73, 72, 71, 70, 69, 68, 67, 66, 65, 64, 63, 62, 61, 60, 59, 58, 57, 56, 55, 54, 53, 52, 51, 50, 49, 48, 47, 46, 45, 44, 43, 42, 41, 40, 39, 38, 37, 36, 35, 34, 33, 32, 31, 30, 29, 28, 27, 26, 25, 24, 23, 22, 21, 20, 19, 18, 17, 16, 15, 14, 13, 12, 11, 10, 9, 8, 7, 6, 5, 4, 3, 2 [different values of z are different embodiments]; or
(b) IF1 protein fragment (or sequence variant thereof) of (using “mature” {without MIS} IF1 protein numbering) x-y, where x is an integer between 1 and 20 (or between 1 and 44, or between 1 and 84), and y is an integer between 40 and 85 (or between 40 and 85, or between 2 and 85) [different values of x and/or y are different embodiments; within their aforementioned range constraints, all possible combinations of x and y integer values are contemplated]; or
(c) IF1 protein fragment (or sequence variant thereof) selected from a group comprising (using “mature” [without MIS] IF1 protein numbering): 1-84, 2-84, 3-84, 4-84, 5-84, 6-84, 7-84, 8-84, 9-84, 10-84, 11-84, 12-84, 13-84, 14-84, 15-84, 16-84, 17-84, 18-84, 19-84, 20-84, 21-84, 22-84, 23-84, 24-84, 25-84, 26-84, 27-84, 28-84, 29-84, 30-84, 31-84, 32-84, 33-84, 34-84, 35-84, 36-84, 37-84, 38-84, 39-84, 40-84, 41-84, 42-84, 43-84, 44-84, 45-84, 46-84, 47-84, 48-84, 49-84, 50-84, 51-84, 52-84, 53-84, 54-84, 55-84, 56-84, 57-84, 58-84, 59-84, 60-84, 61-84, 62-84, 63-84, 64-84, 65-84, 66-84, 67-84, 68-84, 69-84, 70-84, 71-84, 72-84, 73-84, 74-84, 75-84, 76-84, 77-84, 78-84, 79-84, 80-84, 81-84, 82-84, 83-84, O R a sub-sequence/fragment of one of these aforementioned fragments; or
(d) IF1 protein fragment (or sequence variant thereof) optionally selected from (using “mature” {without MIS} IF1 protein numbering): residues: 14-47, 13-47, 12-47, 11-47, 10-47, 9-47, 8-47, 7-47, 6-47, 5-47, 4-47, 3-47, 2-47, 1-47, 14-48, 14-46, 14-45, 14-44, 14-43, 14-42, 13-48, 13-46, 13-45, 13-44, 13-43, 13-42, 12-48, 12-46, 12-45, 12-44, 12-43, 12-42, 11-48, 11-46, 11-45, 11-44, 11-43, 11-42, 10-48, 10-46, 10-45, 10-44, 10-43, 10-42, 42-58, 42-59, 1-56, 1-57, 1-58, 1-59, 1-60, 10-56, 10-57, 10-58, 10-59, 10-60, 14-60, 10-84, 14-84, 18-84, 10-50, 1-45, 42-56, 42-47, 48-56, 49-55 (or sequence variant thereof of any fragment aforementioned); or
(e) IF1 protein fragment (using “mature” {without MIS} IF1 protein numbering): residues: 10-47 or 13-47 or 42-58 or 42-59 or 42-56 or 1-56 or 1-58 or 1-60 or 10-56 or 10-58 or 10-60 (or sequence variant thereof); or
(f) bowhead whale IF1 protein fragment (using “mature” {without MIS} IF1 protein numbering): residues: 10-47 or 13-47 or 42-58 or 42-59 or 42-56 or 1-56 or 1-58 or 1-60 or 10-56 or 10-58 or 10-60; or
(g) blue whale IF1 protein fragment (using “mature” {without MIS} IF1 protein numbering): residues: 10-47 or 13-47 or 42-58 or 42-59 or 42-56 or 1-56 or 1-58 or 1-60 or 10-56 or 10-58 or 10-60, preferably with a T14A substitution; or
(h) human IF1 protein fragment (using “mature” {without MIS} IF1 protein numbering): residues: 10-47 or 13-47 or 42-58 or 42-59 or 42-56 or 1-56 or 1-58 or 1-60 or 10-56 or 10-58 or 10-60, preferably with a S14A substitution;
in one or more of:
(i) one or both its eyes;
(ii) forebrain/intestine/liver and at least one other brain region/body region/organ/tissue/cell population;
(iii) forebrain/intestine/liver and at least two other brain/body regions/organs/tissues/cell populations;
(iv) two or more of forebrain, midbrain and hindbrain;
(v) cell type(s)/cell population(s)/tissue(s)/organ region(s)/organ(s) that tends to age faster, and underperform/fail/lose optimal function earlier (optionally wherein this underperformance/failure/optimal function loss can cause a pathology/disease in a subject [e.g. of aging] and/or sign(s) of aging/older age/old age e.g. a neurodegenerative disease), than most cell type(s)/cell population(s)/tissue(s)/organ region(s)/organ(s) in the body;
(vi) in one or more dopamine neurons, preferably the majority/all, in the pars compacta (in the substantia nigra);
(vii) in more than one different cell population/tissue/organ region/organ/brain region (and/or one or more sub-parts/regions thereof), optionally in at least 15% or 25% or 50% or 75% or 90% or many/majority of the organism's cells/cell populations/tissues/organs, optionally in all;
preferably wherein this modified organism has a longer healthspan and/or lifespan than is typical for its species, optionally wherein, if the modified organism is a mouse, it has a lifespan in excess of 6 and/or 5 years, optionally wherein this organism is entered into one or more lifespan and/or healthspan assays (and/or competitions e.g. M Prize or similar) of the art, optionally wherein this longer healthspan and/or lifespan is only observed, especially if the organism is of a homeothermic species, when the following is adhered to:
the organism lives (is reared/housed/kept) at a higher/sufficiently high safe ambient temperature (e.g. at, or at a safe temperature in excess of, 25/30/37° C.), and/or is afforded more bodily insulation, to account for it having less endogenous/metabolic heat production and a higher thermoneutral/thermo-comfortable temperature.

30. At least one compound and/or composition for use in a method of any of claims 20-27 and/or a pharmaceutical/cosmetic/supplement composition/medicament/peptide/protein/vector/gene therapy of any of claims 16, 19, 28, wherein the unwanted/undesirable aspect(s)/sign(s) of aging and/or disorder(s)/disease(s) of aging (e.g. incidence increases with increased age/senescence) includes (to illustrate and not restrict) geriatric aging, age-associated decline, age-related/correlated disease/disorder/condition, aging frailty, frailty, frailty syndrome, wasting, sarcopenia, muscle weakness, weakness, muscle fatigue, weight loss, cachexia, functional decline, osteoporosis, sclerosis, kyphosis, reduction in bone density, cognitive decline, neurological decline, cognitive deficit, cognitive impairment, mild cognitive impairment, depression, degenerative diseases, neurodegenerative diseases, motor-associated neurodegenerative diseases, motor neuron disease, motor neuron dysfunction, amyotrophic lateral sclerosis (ALS), primary lateral sclerosis, progressive muscular atrophy, age-related muscular atrophy, age-related fat loss, progressive bulbar palsy, progressive supranuclear palsy, pseudobulbar palsy, hereditary spastic paraplegia, Parkinson's disease, parkinsonism, Multiple System Atrophy (MSA), Progressive Supranuclear Palsy (PSP), essential tremor, resting tremor, Alzheimer's disease, Huntington's disease, spinocerebellar ataxias, Friedreich's ataxia, cerebellar ataxia, dysautonomia, dementia, frontotemporal dementia, chronic traumatic encephalopathy, memory loss, aged cognition, age/aging related cognitive decline/impairment, congential epilepsy, Batten disease, polyglutamine diseases, atherosclerosis, atherosclerotic plaque in a blood vessel, arteriosclerosis, vascular stiffening, arterial stiffness, stiffened arteries, hypertension, cardiovascular disease(s), myocardial infarction, acute myocardial infarction, angina, arrhythmia, cardiomyopathy, congestive heart failure, coronary artery disease, carotid artery disease, endocarditis, coronary thrombosis, myocardial infarction, ischemia reperfusion injury, anemia, hypertension, aortic aneurysm, cardiac diastolic dysfunction, irregularity in heart rhythm, decrease in cardiac stress tolerance, increase in the cross-sectional area of cardiomyocyte(s), hypercholesterolemia, hyperlipidemia, mitral valve prolapsed, peripheral vascular disease, cardiac stress resistance, brain aneurysm, inflammatory or autoimmune disease, cerebrovascular disease, stroke, heart failure, heart failure with preserved ejection fraction, fibrosis, idiopathic pulmonary fibrosis (IPF), pulmonary fibrosis, fibrotic disease, cardiac fibrosis, liver fibrosis, pancreatic fibrosis, oral submucosa fibrosis, cystic fibrosis, gum recession, gingival recession, oral mucositis, pulmonary disease, age-related loss of pulmonary function, chronic obstructive pulmonary disease, emphysema, bronchiectasis, coronary artery disease, hypercholesterolemia, liver disease, fatty liver disease, lysosomal storage disease, amyloidosis, systemic sclerosis, kidney disease, chronic kidney disease, renal disease, renal failure, end-stage renal disease (ESRD), renal insufficiency, glomerulosclerosis, cirrhosis, hepatic cirrhosis, hepatic insufficiency, immunosenscence, clonal hematopoiesis, Chronic Obstructive Pulmonary Disease (COPD), emphysema, breathlessness, asthma, hypertension, hypercholesterolemia, age-related thymic atrophy, chronic inflammatory disease(s), joint pain, arthritis, osteoarthritis, osteoarthritis of knee(s), arthritis (Osteo- and Rheumatoid), Juvenile Rheumatoid Arthritis (JRA), arthrosis, herniated intervertebral disc, kyphosis, degenerative disc disease, vertebral disc degeneration, tendinopathy, androgenetic alopecia, male-pattern baldness, hair loss, Idiopathic Pulmonary Fibrosis, systemic sclerosis, Psoriasis, age-related loss of cardiac/pulmonary/cognitive/vision function, decrease in cardiac stress tolerance, insulin sensitivity, poor glycemic control, diabetes, type 1 diabetes, type 2 diabetes, diabetic ulcer, diabetic retinopathy, diabetic neuropathy, diabetic nephropathy (diabetic kidney disease), diabetic ulcer, boutonneuse fever, obesity, metabolic disease/syndrome/dysfunction, inflammatory bowel disease, andropause, glaucoma, progressive glaucoma, retinal degeneration, sarcopenia, cachexia, age-related cachexia and/or sarcopenia, macular degeneration, Age-related Macular Degeneration (AMD, early/intermediate/late), age-related wet macular degeneration, neovascular/wet AMD, dry age-related macular degeneration, dry AMD, Geographic atrophy (G A), dry age-related macular degeneration with geographic atrophy, wet and dry AMD in the same eye(s), Stargardt's macular degeneration, Best vitelliform macular dystrophy, retinopathy, diabetic retinopathy, proliferative diabetic retinopathy, diabetic macular edema, age/aging-related eye disease, ophthalmological/ophthalmic disease/disorder/condition, ocular disease, vision loss, blindness, progressive vision impairment, myopia (short-sightedness), degenerative myopia, hyperopia (far-sightedness), accommodative dysfunction, cataract formation, cataract(s), retinal degeneration, progressive retinal degeneration, presbyopia, vision loss, retinitis pigmentosa, leber hereditary optic neuropathy, Fuchs spot, Best's disease, Sorsby's fundus dystrophy, vaso-obliteration in eye(s), oxygen induced vaso-obliteration, neovascularization in eye(s), hearing loss (e.g. age-related), deafness, presbycusis, tinnitus, naive T cell shortage, movement disability, nonalcoholic fatty liver disease (NAFLD), nonalcoholic steatohepatitis (NASH), immunosenescence, immune senescence, poor immune response to a vaccine(s) (so countering this improves vaccine response=improves the protection conferred by a vaccine), respiratory/urinary tract infection (RTI/UTI) especially in older/aged/elderly subjects, loss of bladder control, lower urinary tract symptoms (LUTS), Benign Prostatic Hyperplasia (BPH), hyperplasia, polycystic kidney disease, cancer, age-related cellular hypertrophy, dermatological disease/disorder, eczema, psoriasis, hyperpigmentation, nevi, rashes, atopic dermatitis, urticaria, diseases/disorders related to photosensitivity/photoaging, rhytides, pruritis, dysesthesia, eczematous eruptions, eosinophilic dermatosis, reactive neutrophilic dermatosis, pemphigus, pemphigoid, immunobullous dermatosis, fibrohistocytic proliferations of skin, cutaneous lymphomas, cutaneous lupus, a hallmark(s) of aging, genomic instability, telomere attrition, epigenetic alteration(s), loss of proteostasis, deregulated nutrient sensing, mitochondrial dysfunction, cellular senescence, stem cell exhaustion, altered intercellular communication, homeostatic imbalance, reduced fitness, reduced reproductive fitness, infertility, female infertility, menopause, incontinence, sleep disturbances, imbalance, fear, depression, ulcers,
wherein the unwanted/undesirable aspect(s)/sign(s) of aging and/or disorder(s)/disease(s) of aging includes (to illustrate and not restrict) accelerated/premature aging, any accelerated/premature aging disease, any progeroid syndrome, including (to illustrate and not restrict) premature aging because of chemo-/radio-/cancer therapy, Werner syndrome, Bloom syndrome, De Barsy syndrome, Rothmund-Thomson syndrome, Cockayne syndrome, xeroderma pigmentosum, trichothiodystrophy, combined xeroderma pigmentosum-Cockayne syndrome, restrictive dermopathy, Wiedemann-Rautenstrauch syndrome, Hutchinson-Gilford progeria syndrome (progeria), a laminopathy, Ataxia telangiectasia-like disorder 2, XFE progeroid syndrome, Muscular dystrophy, Muscular Dystrophy (Becker's, Duchenne, Limb-Girdle), Yamamoto's Muscular Dystrophy, Mandibuloacral dysplasia, Dilated cardiomyopathy, GAPO syndrome, Cutis laxia, Ehlers-Danlos syndrome, Lenz-Majewski hyperostatic dwarfism, SHORT syndrome, Progressive external opthalmoplegia, Nester-Guillermo progeria syndrome, MDPL syndrome, Dyskeratosis congenital, Down syndrome.
